United States Patent Application Publication US 2024/0390433 A1 - sequence listing, part 3

SEQ ID NO: 2 - DNA, 1000000 bp, Bacillus subtilis
  source 1..1000000: mol_type = genomic DNA
atggaaaatatattagacctgtggaaccaagcccttgctcaaatcgaaaaaaagttgagcaaaccgagttttgagacttggatgaagtcaaccaaagcccactcactgcaaggcgatacattaacaatcacggctcccaatgaatttgccagagactggctggagtccagatacttgcatctgattgcagatactatatatgaattaaccggggaagaattgagcattaagtttgtcattcctcaaaatcaagatgttgaggactttatgccgaaaccgcaagtcaaaaaagcggtcaaagaagatacatctgattttcctcaaaatatgctcaatccaaaatatacttttgatacttttgtcatcggatctggaaaccgatttgcacacgctgcttccctcgcagtagcggaagcacccgcgaaagcttacaaccctttatttatctatgggggcgtcggcttagggaaaacgcacttaatgcatgcgatcggccattatgtaatagatcataatccttctgccaaagtggtttatctgtcttctgagaaatttacaaacgaattcatcaactctatccgagataataaagccgtcgacttccgcaatcgctatcgaaatgttgatgtgcttttgatagatgatattcaatttttagcggggaaagaacaaacccaggaagaatttttccatacatttaacacattgcacgaagaaagcaaacaaatcgtcatttcaagtgatcgaccgccaaaggaaattccgacacttgaggacagattgcgctcacgttttgaatggggacttattacagatatcacaccgcctgatctagaaacgagaattgcgattttaagaaaaaaagccaaagcagaaggcctcgatattccgaacgaggttatgctttacatcgcgaatcaaatcgacagcaatattcgggaactcgaaggagcattaatcagagttgtcgcttattcatctttaattaataaagatattaatgctgatctggccgctgaggcgttgaaagatattattccttcctcaaaaccgaaagtcattacgataaaagaaattcagagggtagtaggccagcaatttaatattaaactcgaggatttcaaagcaaaaaaacggacaaagtcagtagcttttccgcgtcaaatcgccatgtacttatcaagggaaatgactgattcctctcttcctaaaatcggtgaagagtttggaggacgtgatcatacgaccgttattcatgcgcatgaaaaaatttcaaaactgctggcagatgatgaacagcttcagcagcatgtaaaagaaattaaagaacagcttaaatagcaggaccggggatcaatcggggaaagtgtgaataacttttcggaagtcatacacagtctgtccacatgtggataggctgtgtttcctgtctttttcacaacttatccacaaatccacaggccctactattacttctactattttttataaatatatatattaatacattatccgttaggaggataaaaatgaaattcacgattcaaaaagatcgtcttgttgaaagtgtccaagatgtattaaaagcagtttcatccagaaccacgattcccattctgactggtattaaaattgttgcatcagatgatggagtatcctttacagggagtgactcagatatttctattgaatccttcattccaaaagaagaaggagataaagaaattgtcactattgaacagcccggaagcatcgttttacaggctcgcttttttagtgaaattgtaaaaaaattgccgatggcaactgtagaaatcgaagtccaaaatcagtatttgacgattatccgttctggtaaagctgaatttaatctaaacggactggatgctgatgagtatccgcacttgcctcagattgaagagcatcatgcgattcagatcccaactgatttgttaaaaaatctaatcagacaaacagtatttgcagtgtccacctcagaaacacgccctatcttgacaggtgtaaactggaaagtggagcaaagtgaattattatgcactgcaacggatagccaccgtcttgcattaagaaaggcaaaacttgatattccagaagacagatcttataacgtcgtgattccgggaaaaagtttaactgaactcagcaagattttagatgacaaccaagaacttgtagatatcgtcatcacagaaacccaagttctgtttaaagcgaaaaacgtcttattcttctcacggcttctggacgggaattatccagacacaaccagcctgattccgcaagacagcaaaacagaaatcattgtgaacacaaaagaattccttcaggccattgatcgtgcatctcttttagctagagagggacgcaacaacgttgtaaaactgtccgcaaaaccggctgaatccattgaaatttcttccaactccccggaaatcggtaaagttgtggaagcaattgctgcggatcaaattgaaggtgaggaattaaatatctcttttagtccaaaatatatgctggatgcactaaaggtgcttgaaggagcagaaatacgcgtaagctttacaggcgcaatgagacctttcttaattcgcacgccgaatgatgaaacgattgtacagcttatcctccctgtcagaacctattaatccgatacactgctgccgacccgtcggcagcttttctattcggtatctgctccgacaagttttccctttccctaattcgtttttttttagtacaattagatattagtgatatttgaaagaggtcgatataatggcaaatccgatttcaattgatacagagatgattacactcggacaattcttaaaattagccgatgtgattcagtctggcggtatggcgaagtggtttttaagcgagcatgaagtgcttgtgaacgatgagccggacaaccgccggggcagaaaactgtatgttggagatgtggtagagattgaaggatttggttcatttcaagtcgtcaattaaagcgggtgacactgattgtatatccagaacttagaactgacatcttaccgcaactacgaccatgctgaacttcaatttgaaaataaagtaaatgtgatcatcggagaaaacgcccaggggaagacaaacctcatggaggcgatctatgtcttgtccatggcgaaatcgcaccggacatcaaatgacaaagaacttatacggtgggacaaagactatgctaaaatagagggaagagtgatgaagcaaaacggggcgatcccgatgcagctcgtcatctccaaaaagggtaaaaagggcaaggtcaatcatattgaacagcaaaagctcagccagtatgtcggagccctcaacaccattatgttcgcgccggaagatttaaatcttgtaaagggaagccctcaagtgagaaggcggtttcttgacatggaaatcggacaggtttctctcgtctaccttcatgatctttctctttaccagaaaatcctttcccagcggaatcattttttgaaacagctgcaaacaagaaaacaaactgaccggacgatgctcgatgttctgaccgatcagcttgtagaagttgcagcaaaagtcgtcgtaaaacgcctgcagtttacagcacagctcgagaaatgggcgcagcccatccatgcaggcatctcaagagggcttgaagaactgaccctgaaataccatacagctcttgaggtatcagatcccctagatttgtcgaaaataggagatagctatcaagaagcgttttctaaattaagagaaaaagaaattgagcgtggtgtgacgctgtcagggcctcatcgcgatgatgttcttttctatgtgaacggacgcgatgtgcagacgtatggttctcaaggacagcagcgaacgacggcgttgtcccttaagctggcggagattgacctgatccatgaagaaatcggagaatatcccattttactattggatgatgtactgagtgaactggatgattatcgccagtcacacttgcttcatacgatccaaggccgtgtacaaacgtttgtcacaacgacaagcgttgatggcattgatcacgaaaccttacgtcaagcaggaatgttccgtgtgcaaaatggtgcgttagtgaagtgaagaaatgaggtgagcaattgtatattcatttaggtgatgactttgtggtttcaacacgagatattgtcggcatttttgactttaaagccaacatgtcgcctattgttgaagaatttctgaaaaaacagaaacacaaggtggtgcctttcgtaaacggcacgcccaaatctatcgtagtcacggttcagaatatatattactctcccttatcttccagcacattaaaaaaacgtgcgcaatttatgtttgaaatagattcttagaaattttttatcacgaatatatcgtttagaaaagtgtaggtgaatgacgtggctatggaacagcagcaaaacagttatgatgaaaatcagatacaggtactagaaggattggaagctgttcgtaaaagaccggggatgtatatcggttcgacaaacagcaaaggccttcaccacctggtatgggaaattgtcgacaatagtattgacgaagccctcgccggttattgtacggatatcaatatccaaatcgaaaaagacaacagtatcacggttgtagataatggccgcggtattccagtcggtattcatgaaaaaatgggccgtcctgcggtagaagtcattatgacggtacttcatgccggaggaaaatttgacggaagcggctataaagtatccggaggattacacggtgtaggtgcgtctgtcgtaaacgcactatcaacagagcttgatgtgacggttcaccgtgacggtaaaattcaccgccaaacttataaacgcggagttccggttacagaccttgaaatcattggcgaaacggatcatacaggaacgacgacacattttgtcccggaccctgaaattttctcagaaacaaccgagtatgattatgatctgcttgccaaccgcgtacgtgaattagcctttttaacaaagggcgtaaacatcacgattgaggataaacgtgaaggacaagagcgcaaaaatgaataccattacgaaggcggaattaaaagttatgtagagtatttaaaccgctctaaagaggttgtccatgaagagccgatttacattgaaggcgaaaaggacggcattacggttgaagtggctttgcaatacaatgacagctacacaagcaacatttactcgtttacaaacaacattaacacgtacgaaggcggtacccatgaagctggcttcaaaacgggcctgactcgtgttatcaacgattacgccagaaaaaaagggcttattaaagaaaatgatccaaacctaagcggagatgacgtaagggaagggctgacagcgattatttcaatcaaacaccctgatccgcagtttgagggccaaacgaaaacaaagctgggcaactcagaagcacggacgatcaccgatacgttattttctacggcgatggaaacatttatgctggaaaatccagatgcagccaaaaaaattgtcgataaaggcttaatggcggcaagagcaagaatggctgcgaaaaaagcccgtgaactaacacgtcgtaagagtgctttggaaatttcaaacctgcccggtaagttagcggactgctcttcaaaagatccgagcatctccgagttatatatcgtagagggtgactctgccggaggatctgctaaacaaggacgcgacagacatttccaagccattttgccgcttagaggtaaaatcctaaacgttgaaaaggccagactggataaaatcctttctaacaacgaagttcgctctatgatcacagcgctcggcacaggtattggggaagacttcaaccttgagaaagcccgttaccacaaagttgtcattatgacagatgccgatgttgacggcgcgcacatcagaacactgctgttaacgttcttttacagatatatgcgccaaattatcgaaaatggctacgtgtacattgcgcagccgccgctctacaaggttcaacaggggaaacgcgttgaatatgcgtacaatgacaaggagctggaagagctgttaaaaactcttcctcaaacgcctaagcctggactgcagcgttacaaaggtcttggtgaaatgaatgccacccagctatgggagacaaccatggatcctagttccagaacacttcttcaggtaactcttgaagatgcaatggatgcggacgagacttttgaaatgcttatgggcgacaaggtagaaccgcgccgaaacttcatagaagcgaatgcgagatacgttaaaaatcttgacatctaatcataaaaagccttatttccaataagaaataaggcttttttctgaacaagatcagatgcagcaatgcttgcagtacctatatattctagcaatttaatgtgtataatcataagtttattgatataatggagaatagtgaaatcgtattgaaggtcataatggacaatctactcccacatatttcatgtgatacttcagggaggttttttaatgagtgaacaaaacacaccacaagttcgtgaaataaatatcagtcaggaaatgcgtacgtccttcttggattatgcaatgagcgttatcgtgtcccgtgctcttccagatgttcgagacggtttaaaaccggttcatagacggattttgtatgcaatgaatgatttaggcatgacaagtgacaagccttataaaaaatccgcgcgtatcgttggagaagttatcgggaaataccacccgcacggtgattcagcggtatatgaatccatggtcagaatggctcaggatttcaactaccgttatatgctcgttgacggtcacggaaacttcggttctgttgacggagactcagcggcggccatgcgttatacagaagcaagaatgtctaaaatctcaatggagattcttcgcgacatcacaaaagacacaatcgattaccaggataactatgacgggtcagaaagagaacctgtcgttatgccttcaaggttcccgaatctgctcgtgaacggtgctgccggcattgcggtaggtatggcaacaaacattcctccgcaccagctgggagaaatcattgacggtgtacttgctgtcagtgagaatccggacattacaattccagagcttatggaagtcattccagggcctgatttcccgaccgcgggtcaaatcttgggacgcagcggtatccggaaagcatacgaatcaggccgaggctctatcacgatccgggcaaaagctgagatcgaacaaacatcttcgggtaaagaaagaattatcgttacagagttaccttaccaagtaaataaggctaaattaattgagaaaattgcagatctcgtaagggacaaaaagatagagggtatcacagatctgcgtgatgagtcagatcgtacaggtatgagaattgtcattgaaatcagacgcgacgccaatgcaaatgtcatcttaaacaatctgtacaaacaaactgctctacaaacatcttttggcatcaacctgcttgcacttgttgatggccagccgaaagttttaactcttaagcaatgcctggagcattacctcgaccatcaaaaagttgtcattagacgccgtactgcttatgaattgcgtaaagcggaagcgagagctcatatcctggaaggattgagagttgcactggatcatctcgatgcagttatctcccttatccgtaattctcaaacggctgaaattgcgagaacaggtttaattgaacaattctcactgacagagaagcaagcacaagcgatccttgatatgaggctccagcgtttaacgggactggaacgtgaaaagatagaagaagaataccaatctcttgttaaattaattgcagagctaaaagacatcttggcaaatgaatataaagtgcttgagatcattcgtgaagaactcacggaaatcaaagagcgttttaacgatgaaagacgtactgagatcgtcacttctggactggagactattgaagatgaagatctcatcgagagagaaaatatcgtagttactctgacgcacaacggatacgtcaaacgtcttcctgcatcaacttaccgcagtcaaaaacgaggcggaaaaggtgtacaaggtatgggaacaaacgaagatgatttcgttgagcatttgatctctacgtcaactcatgacacgattctcttcttctcgaacaaggggaaagtgtatcgtgcaaaagggtatgaaatccctgaatacggcagaacggcaaaaggaatcccgattattaacctgctggaggtagaaaagggtgagtggatcaacgcgattattccagtcacggaattcaatgcggagctttaccttttcttcactacaaagcatggggtttcaaaacgaacatcgctatctcaattcgctaatatccgcaacaatggtctaatcgctctgggtcttcgtgaagatgatgaactgatgggtgtacgtctgactgacggcacaaaacaaatcatcattggaacgaaaaacggtttactgatccgtttccctgaaacagatgtccgggagatgggaagaactgcggcgggcgtaaaaggcatcaccctgacggatgacgacgttgttgtcggcatggagatattagaggaagaatcacacgtccttatcgtaactgaaaaagggtacggaaaacgaactccggctgaagagtacagaacccaaagccggggcggaaaaggactcaaaacagcgaaaatcaccgagaacaacggccaactagtagcagtgaaagctactaaaggtgaagaggatctaatgattattacagctagcggcgtactcatcagaatggacatcaatgatatctccatcaccggacgtgtcactcaaggtgtgcgtctcatcagaatggcagaagaagagcatgttgctacagtagctttagtagagaaaaacgaagaagatgagaatgaagaagaacaagaagaagtgtgagaaaaagcgcagctgaaatagctgcgcttttttgtgtcataaccctttacagtcataaaaattatggtataatcatttttgttgtctttttaaagacacaagcatgaccattatgactagtaaaaacttttttaaaaaagtattgacctagttaactaaaaatgttactattaagtagtcgcttcgagagaagcacacaaagttctttgaaaactaaacaagacaaaacgtacctgttaattcatttttaaaaatcgcacagcgatgtgcgtagtcagtcaaactagggcctgcacgacgcaggtcacacaggtgtcgccgcaggatgcggtgaacttaacctgtgatccatttatcggagagtttgatcctggctcaggacgaacgctggcggcgtgcctaatacatgcaagtcgagcggacagatgggagcttgctccctgatgttagcggcggacgggtgagtaacacgtgggtaacctgcctgtaagactgggataactccgggaaaccggggctaataccggatggttgtttgaaccgcatggttcaaacataaaaggtggcttcggctaccacttacagatggacccgcggcgcattagctagttggtgaggtaacggctcaccaaggcaacgatgcgtagccgacctgagagggtgatcggccacactgggactgaggcacggcccagactcctacgggaggcagcagtagggaatcttccgcaatggacgaaagtctgacggagcaacgccgcgtgagtgatgaaggttttcggatcgtaaagctctgttgttagggaagaacaagtaccgttcgaatagggcggtaccttgacggtacctaaccagaaagccacggctaactacgtgccagcagccgcggtaatacgtaggtggcaagcgttgtccggaattattgggcgtaaagggctcgcaggcggtttcttaagtctgatgtgaaagcccccggctcaaccggggagggtcattggaaactggggaacttgagtgcagaagaggagagtggaattccacgtgtagcggtgaaatgcgtagagatgtggaggaacaccagtggcgaaggcgactctctggtctgtaactgacgctgaggagcgaaagcgtggggagcgaacaggattagataccctggtagtccacgccgtaaacgatgagtgctaagtgttagggggtttccgccccttagtgctgcagctaacgcattaagcactccgcctggggagtacggtcgcaagactgaaactcaaaggaattgacgggggcccgcacaagcggtggagcatgtggtttaattcgaagcaacgcgaagaaccttaccaggtcttgacatcctctgacaatcctagagataggacgtccccttcgggggcagagtgacaggtggtgcatggttgtcgtcagctcgtgtcgtgagatgttgggttaagtcccgcaacgagcgcaacccttgatcttagttgccagcattcagttgggcactctaaggtgactgccggtgacaaaccggaggaaggtggggatgacgtcaaatcatcatgccccttatgacctgggctacacacgtgctacaatggacagaacaaagggcagcgaaaccgcgaggttaagccaatcccacaaatctgttctcagttcggatcgcagtctgcaactcgactgcgtgaagctggaatcgctagtaatcgcggatcagcatgccgcggtgaatacgttcccgggccttgtacacaccgcccgtcacaccacgagagtttgtaacacccgaagtcggtgaggtaaccttttaggagccagccgccgaaggtgggacagatgattggggtgaagtcgtaacaaggtagccgtatcggaaggtgcggctggatcacctcctttctaaggatattatacggaatataagaccttgggtcttataaacagaacgttccctgtcttgtttagttttgaaggaactttgttccttgaataagttaagatgggcctgtagctcagctggttagagcgcacgcctgataagcgtgaggtcggtggttcgagtccactcaggcccaccatcttatataacggggccttagctcagctgggagagcgcctgctttgcacgcaggaggtcagcggttcgatcccgctaggctccaccaacgtgttctttgaaaactagataacagtagacatcacattcaattagtaatacaagatatcacatagtgattctttttaacggttaagttagaaagggcgcacggtggatgccttggcactaggagccgatgaaggacgggacgaacaccgatatgcttcggggagctgtaagcaagctttgatccggagatttccgaatggggaaacccaccactcgtaatggagtggtatccatatctgaattcataggatatgagaaggcagacccggggaactgaaacatctaagtacccggaggaagagaaagcaaatgcgattccctgagtagcggcgagcgaaacgggattagcccaaaccaagaggcttgcctcttggggttgtaggacactctgtacggagttacaaaggaacgaggtagatgaagaggtctggaaaggcccgccataggaggtaacagccctgtagtcaaaacttcgttctctcctgagtggatcctgagtacggcggaacacgtgaaattccgtcggaatccgggaggaccatctcccaaggctaaatactccctagtgaccgatagtgaaccagtaccgtgagggaaaggtgaaaagcaccccggaaggggagtgaaagagatcctgaaaccgtgtgcctacaagtagtcagagcccgttaacgggtgatggcgtgccttttgtagaatgaaccggcgagttacgatcccgtgcaaggttaagcagaagatgcggagccgcagcgaaagcgagtctgaatagggcgcatgagtacgtggtcgtagacccgaaaccaggtgatctacccatgtccagggtgaagttcaggtaacactgaatggaggcccgaacccacgcacgttgaaaagtgcggggatgaggtgtgggtaggggtgaaatgccaatcgaacctggagatagctggttctctccgaaatagctttagggctagcctcaaggtaagagtcttggaggtagagcactgattggactaggggcccctaccgggttaccgaattcagtcaaactccgaatgccaatgacttatccttgggagtcagactgcgagtgataagatccgtagtcgaaagggaaacagcccagaccgccagctaaggtcccaaagtatacgttaagtggaaaaggatgtggagttgcttagacaaccaggatgttggcttagaagcagccaccatttaaagagtgcgtaatagctcactggtcgagtgactctgcgccgaaaatgtaccggggctaaacgtatcaccgaagctgcggactgttcttcgaacagtggtaggagagcgttctaagggctgtgaagccagaccggaaggactggtggagcgcttagaagtgagaatgccggtatgagtagcgaaagaggggtgagaatcccctccaccgaatgcctaaggtttcctgaggaaggctcgtccgctcagggttagtcgggacctaagccgaggccgaaaggcgtaggcgatggacaacaggttgatattcctgtaccacctcctcaccatttgagcaatggggggacgcaggaggatagggtaagcgcggtattggatatccgcgtccaagcagttaggctgggaaataggcaaatccgtttcccataaggctgagctgtgatggcgagcgaaatatagtagcgaagttcctgattccacactgccaagaaaagcctctagcgaggtgagaggtgcccgtaccgcaaaccgacacaggtaggcgaggagagaatcctaaggtgatcgagagaactctcgttaaggaactcggcaaaatgaccccgtaacttcgggagaaggggtgctctgttagggtgcaagcccgagagagccgcagtgaataggcccaggcgactgtttagcaaaaacacaggtctctgcgaagccgtaaggcgaagtataggggctgacgcctgcccggtgctggaaggttaagaggagcgcttagcgtaagcgaaggtgcgaattgaagccccagtaaacggcggccgtaactataacggtcctaaggtagcgaaattccttgtcgggtaagttccgacccgcacgaaaggcgcaacgatctgggcactgtctcaacgagagactcggtgaaattatagtacctgtgaagatgcaggttacccgcgacaggacggaaagaccccgtggagctttactgcagcctgatattgaatgttggtacagcttgtacaggataggtaggagccttggaaaccggagcgccagcttcggtggaggcatcggtgggatactaccctggctgtattgaccttctaacccgccgcccttatcgggcggggagacagtgtcaggtgggcagtttgactggggcggtcgcctcctaaaaggtaacggaggcgcccaaaggttccctcagaatggttggaaatcattcgcagagtgtaaaggcacaagggagcttgactgcgagacctacaagtcgagcagggacgaaagtcgggcttagtgatccggtggttccgcatggaagggccatcgctcaacggataaaagctaccccggggataacaggcttatctcccccaagagtccacatcgacggggaggtttggcacctcgatgtcggctcatcgcatcctggggctgtagtcggtcccaagggttgggctgttcgcccattaaagcggtacgcgagctgggttcagaacgtcgtgagacagttcggtccctatccgtcgcgggcgcaggaaatttgagaggagctgtccttagtacgagaggaccgggatggacgcaccgctggtgtaccagttgttctgccaagggcatcgctgggtagctatgtgcggacgggataagtgctgaaagcatctaagcatgaagcccccctcaagatgagatttcccattccgcaaggaagtaagatccctgaaagatgatcaggttgataggtctgaggtggaagtgtggcgacacatggagctgacagatactaatcgatcgaggacttaaccatatttttgaatgatgtcacacctgttatctagttttgagagaacactctcaatttgtttggtggcgatagcgaagaggtcacacccgttcccataccgaacacggaagttaagctcttcagcgccgatggtagtcgggggtttccccctgtgagagtaggacgccgccaagcaagcttaaacccagctcattgagctgggttttttgtttgttaaaaatgaagaagaaactgtgaagcgtatttagggaatttattttctgatactaataaaaactgctgaattaacacgtagtcatcacttatatgctgtgttaataactcataccaccattctgtttcataccttgcaatcatcccaacgttgtacaaaatcaaataatgaattgtcatttcgggaagcctcagaaattgctccctttgagaagggatataatattggttcttttccatgtcaaacaataagctggtcgatgtccatggctccttgtcttgtggtgaaatttcgaacagcagcccgtgttcatttttttttgtaaaagaccattgataatgatgggacatgtattcagcaaaccttgaatcagacattttgtaattgattactacttcctccggtataaaaatttcgttcttatccttctcaacttttgtcataaatcgttctttctgctgaaagtagaaaatatcgctaagttctggaatggccattaataattttttcatggtataccgttcatctactatatccgattgtccaaataaatgtttcataaaatgtacgcataggccattccgttgtattttcacttcatcgtcgctaaaacaataattttgtttctttcgttttcttgttgttacgccatgtgccagtactgatgtatggcttggataatgaggatcacgtgtaattaagcatgctttgataagctgtgccattccataaaataaaagaatcggtttgatttctaagggagaatatgcagcttgtttataaaacgattcggcatgctttaagaaataaataaaccgttcactgtttttaaaagagttttttttcgcatcgtcaataccgtttaagatataaaccttttctagaaatttctgggttgattcaacggagtaaaatagcgctaagtctttccactcatgatatgtcatgtatatttcttaatcctttccgttatctaaatatttcaactctttcccgcttccttgacatgctcttggctagttgataatctacatataatattttgccgaaaagagggggatttactaatgtgggaaagtaaattttcaaaagaaggcttaacgttcgacgatgtgctgcttgtaccagcaaagtctgaggtacttccgcgtgatgtggatttatctgtagaacttacaaaaacgttaaagctaaatattcctgtcatcagcgcaggtatggacactgtaacagaatcagcaatggcaattgcaatggcaagacagggcggcttgggcatcattcacaaaaatatgtccattgaacagcaggctgaacaagttgataaagtaaagcgttctgagcgcggcgttatcacaaatcccttctttttaactcctgatcaccaagtatttgatgcggagcatttgatggggaaatacagaatttccggtgttccgattgtaaataacgaagaagaccagaagcttgttggaattattacaaaccgtgaccttcgttttatttctgactactcaatgaaaatcagcgacgtcatgacgaaagaagagctagttactgcatctgtaggaactactctggatgaagctgaaaagattttgcagaaacataaaattgaaaagcttcctctcgtagatgaccagaataaattaaaaggtcttatcacaattaaagacattgaaaaagtcattgagttcccgaactcatctaaagacattcacggccgcctgatcgttggcgcggcagttggtgtaactggcgatacaatgactcgcgtcaaaaagcttgttgaagccaatgttgatgtgattgttatcgatacagctcacggacactctcaaggcgttttaaacacagtcacaaaaattcgtgaaacgtatcccgaattaaacattattgctggaaacgtggcaacagctgaagcgacaagagcgcttatcgaagctggagcagacgttgtcaaagttggaataggacctggttcaatttgtactacacgtgttgtagccggcgtcggtgttccgcaaattacagcaatttatgattgtgcgactgaagcaagaaaacacggcaaaacaatcatagccgatggtgggattaaattctctggcgatatcactaaagcgttggcagccggcggacatgctgttatgctcggaagcttgcttgcaggcacatctgaaagccctggtgaaactgaaatctatcaaggcagaagatttaaggtataccgcggcatgggatcagttgctgcaatggaaaaaggaagtaaagaccgttacttccaagaagaaaacaaaaaatttgttcctgaaggaattgaaggacgcacaccttacaaagggccagttgaagaaaccgtttatcagctagtcggaggccttcgttctggtatggggtattgcgggtccaaagatctgcgtgcgctaagagaagaagctcagttcattcgcatgactggcgcaggacttcgcgaaagccatccgcatgacgtacagattacaaaagaatcacctaactatacaatttcataataaattgttacaaattaaaaacatttgacagggtctctgactctgtctattttttttatactgattatgataaaatttatactgttgtgcattgaaaatgtccttaacggcttaattatagatgaagaaaatgaaatacggaggtcgtacgattgaacatcaagaaatgtaaacagctactgatgtcattggttgtgttaactctagctgtcacgtgtctggctccaatgtcaaaagcaaaagcagccagcgatccaattgatatcaatgcatctgctgctattatgatcgaagcttcttcaggtaaaattctttacagtaaaaatgcagataagagactgccaattgcgagtatgacaaaaatgatgacagagtatctgttattagaagcaattgatcaaggtaaagtgaaatgggaccaaacctatacgcctgatgactatgtgtatgaaatttcccaagataacagcttatcaaacgttcctcttcggaaagacgggaaatacacagtaaaagaattatatcaagctacagcaatttattctgcaaatgctgctgctattgcaattgcagaaatcgttgccggttctgaaactaagtttgttgaaaaaatgaatgcaaaagcaaaagaactaggcttaacagattacaaatttgttaacgcaacaggtcttgaaaacaaagatcttcacgggcatcagcctgaggggacaagcgtaaatgaagaaagtgaagtttctgcaaaggatatggcaattcttgcggatcacttgattactgactaccctgagatactggagacttccagtatcgccaaaacgaaattcagagaaggcaccgatgatgaaatggacatgccgaactggaattttatgctgaaggggcttgtcagcgagtataaaaaagcgactgtagacggactgaaaacaggttctactgactctgcgggttcatgctttacaggaacagctgaacgcaacggtatgcgtgtcatcactgttgttttaaacgcgaagggcaaccttcatacaggccgtttcgatgaaacgaaaaaaatgtttgattatgctttcgacaatttctccatgaaagaaatttatgctgaaggcgatcaagtaaaaggccataaaacaatttcagttgataagggtaaagagaaagaagtaggcattgtgacaaacaaggcgttctctcttcctgtcaaaaatggtgaagaaaagaattacaaagcgaaggtcacactgaataaagacaacttaactgctcctgtgaaaaaaggaaccaaggttgggaagctgactgcggaatacacaggtgatgaaaaggattacggattccttaacagcgatctggctggcgtagaccttgttacaaaagaaaatgtagaaaaagcaaactggtttgttttgacaatgcgcagtatcggcggattttttgccggaatttggggaagcattgttgatacggtaaccggctggttttaatcaattgaaagagctctgatggatgttagggctctttcgcgtaatatactgaaaaaacccaatttttaataaaaaatgattttcaaagcgctaaaaaccgaataaaatagtatatatccatatgaattattggatttctaggatacaataaggattagaaatcatataactataccttgattagggggaccaagaaatggctcaaacaggtactgaacgtgtaaaacgcggaatggcagaaatgcaaaaaggcggcgtcatcatggacgtcatcaatgcggaacaagcgaaaatcgctgaagaagctggagctgtcgctgtaatggcgctagaacgtgtgccagcagatattcgcgcggctggaggagttgcccgtatggctgaccctacaatcgtggaagaagtaatgaatgcagtatctatcccggtaatggcaaaagcgcgtatcggacatattgttgaagcgcgtgtgcttgaagctatgggtgttgactatattgatgaaagtgaagttctgacgccggctgacgaagaatttcatttaaataaaaatgaatacacagttccttttgtctgtggctgccgtgatcttggtgaagcaacacgccgtattgcggaaggtgcttctatgcttcgcacaaaaggtgagcctggaacaggtaatattgttgaggctgttcgccatatgcgtaaagttaacgctcaagtgcgcaaagtagttgcgatgagtgaggatgaactaatgacagaagcgaaaaatctaggtgctccttacgagcttcttcttcaaattaaaaaagacggcaagcttcctgtcgttaactttgccgctggcggtgtagcaactccagctgatgctgctctcatgatgcagctcggtgctgacggagtatttgttggttctggtattttcaaatcagacaaccctgctaaatttgcgaaagcaattgtggaagcaacaactcactttactgattacaaattaatcgctgagttgtcaaaagagcttggtactgcaatgaaagggattgaaatctcaaacttacttccagaacagcgtatgcaagaacgcggctggtaagaacataggagcgctgctgacatgttaacaataggtgtactaggacttcaaggagcagttagagagcacatccatgcgattgaagcatgcggcgcggctggtcttgtcgtaaaacgtccggagcagctgaacgaagttgacgggttgattttgccgggcggtgagagcacgacgatgcgccgtttgatcgatacgtatcaattcatggagccgcttcgtgaattcgctgctcagggcaaaccgatgtttggaacatgtgccggattaattatattagcaaaagaaattgccggttcagataatcctcatttaggtcttctgaatgtggttgtagaacgtaattcatttggccggcaggttgacagctttgaagctgatttaacaattaaaggcttggacgagccttttactggggtattcatccgtgctccgcatattttagaagctggtgaaaatgttgaagttctatcggagcataatggtcgtattgtagccgcgaaacaggggcaattccttggctgctcattccatccggagctgacagaagatcaccgagtgacgcagctgtttgttgaaatggttgaggaatataagcaaaaggcacttgtataaaacagttgaaagctgtggaaacttatagtacattataagcacaaataaagatcgaaaagcgttgataggaactagtagggagcctctctttctaagagagccgatggttggtgcgaatcggtgaaagatgctgtctgaatccatccttgagcgaaatgctgaagcgagtaggcatttacgggataaccgttatgtttgaaagtggaaaacgagtctttgatttgttttcaatcagggtggcaacgcgagagctctcgtccctttatggggatgagggctctttttattttcgataaatcaataaaaaaaggagtgtttcgcatgcttgatacgaaaatgctgagagcaaattttcaagaaattaaagcaaagcttgtacacaaaggcgaagacttaactgattttgataagtttgaggcgctggatgatagacgaagagagcttatcggcaaggttgaagagttaaaaggaaaacgaaatgaagtttctcagcaggttgctgtgctgaagcgtgagaaaaaagacgcggatcacattattaaagcaatgcgtgaagtcggcgaggaaattaaaaagctcgatgaagaattacggacagtggaagctgagcttgatacaatcctgctctcaatcccgaatattccgcatgagtctgtacctgtcggtgaaacagaagacgacaacgtagaagtgcgtaaatggggtgaaaagccttcatttgcttatgagccgaagccgcactgggatattgcggatgagctgggtattctggattttgaacgtgctgccaaagtaacaggaagccgtttcgtgttctataaaggcttaggtgctcgtctggagcgtgcgctttataactttatgcttgatctgcatgtggatgagtataactacactgaagtgatcccgccatatatggtaaaccgcgcaagcatgacgggaacggggcagcttcctaaatttgaagaggatgcatttaaaatcagagaagaagattatttcttaattccaacggcggaagtgccgattacaaacatgcatcgcgatgaaatcctttcaggtgacagcctgccgatcaactatgcggcattcagtgcttgcttccgttctgaagctggttcagcaggacgtgacacacgcggattaattcgtcagcaccaatttaataaagttgagcttgtaaagtttgtgaagcctgaagattcttatgaagaattagagaaacttacaaaccaagcagaacgggttcttcagctgcttgagcttccataccgtgtcatgagcatgtgtacgggtgacttaggctttacggctgcgaaaaaatacgatatcgaagtttggattccaagccaagacacatatcgagaaatctcttcttgcagcaacttcgaagcgttccaggcgagacgtgcgaatattcgtttcagacgtgaagctaaaggcaagcctgagcatgtacacacactgaacggttcaggactggcggttggaagaacagttgccgctatcttagaaaattatcagcaggaagacggaagcgttgtgattccgaaagtgctccgtccttatatggggaatagagaagtaatgaaaccgtaaattatggaaaggcgtgcctgacaaggtgcgcctttttgcttatgtaaacacggcattttcataaaaacaaaaaaagtttttaaaaatgcttgaccacacgagaacatacgtgatatagtaagtcttgtcgatacggaggaatacccaagtccggctgaagggatcggtcttgaaaaccgacaggggtgtcaaagcccgcgggggttcgaatccctcttcctccgccatattgattttaattctaatgaaacacaagcatatattggagattgttttgtccgttgcattcggtgcggcggattttttattttaaagaaaaagtgaatctcgactgagattcactttttttgattatcatgaataactgaagcaatttgatctacaatattttcaatcgagttttcgtcgttcagaagatcataatcttcaatgcgaagttttaaaacagggcaggcattaaaaccgcttatccagttctcgtagcgtgtatgcatttcttcccaataagacctgcttgtctgaagctccatctcacggccgcgttgttcaatccggtttaaaatgttctccagatctccttctaaatagatcagcacatctgggtgtgggaaatacggtgtcattaccattgcttcgaaaaggcttgtgtaagtcttataatcaacctttgacattgtccctttatcagcatgcatttttgcgaaaattcctgtatcttcataaatcgaacgatcctgtacaaaacctccgccggcttcaaaaattgttttctgttctttgaagcgttcagctaagaagtaaatttgaaggtgaaagctccaacgttcaaaatcatgatagaacttttccaagtatggattatgatcgacttcctccaaagatgttttaaatccaagccgtttagctaaagtttttgttaaagtcgattttccgacacctactgttcctgctactgtaataattgaattcttagggatatgatgttccttcatacgataagctcctttacatgggcggcaatgcgttcaaagtcgctcttattcaaaacgaaatcctttgaatcaccatctacggttaacactgtaagttcagggtctgcttcctgcagctgcttgatggcgacttcataatctgaaatcagctgctccaaatagctagtttcaatttttttctcaaaggggcgcccgcgtttttcaatgcggtgtagcaatgtaggcagactggcctttatgtaaatgatgaaattcggctttggcagatcatccgttagcaggtgatatatctttttgtatttttccagctgatgtggagacaaggtgcgttccgcaaaaatcacatttttataaatatgataatcagctattacaggctgtcccttttttaaaaagtgatcactggtgtcttcaagctgtttgtatctgtgacaaagaaaaaacatctcgagctggaagctccattcctctatattgtcataaaacttatcaaggtacgggttatcctctacaatctcattgatcatagggaatccgaattcttgtgagagcatcgttgcgagagttgtttttcctgccccgataggaccttctattgcaataaaaggggctgtattcatcggaatcctccttatatctgaaaaacgtgcgtcagttaccgaccttcatattgtatcacaacccttgggtgcccccatgaaaaaagacgtttccaaattatcgaaacgtctttttgacaacattaaattgatcagacagcagcagccagttttgtggaaaggaaagacccagcttccaatagctgatgcctcttaaattcagctctttaatcagattaaattttgcttgaatcgagcgggcatcctcgaaccatacctcgtgccttctgttttctgcatcagtatagcggaagaaaggagcttgagcggtttggtcatactgaatggaagcattgttctgatcagctatgacaatggcttgctgagggcttactgctcttgctggagttccccctgctgtatatggcagcgtccagtcatatccatataaattctggcccatgacaattttgttcgcaggcatttcagtcaaagcatattctatgacatcacggacaggtccaattggagaaaccgcttgaggcggcccgccgctatagccccattcatatgtcatgagaacaacaaagtcgacaatttggccatgcgccctgtaatcatgagcttcataccatctgccctgctgtgttgcacttgttttaggagcaagtgccgtagaaatttctaagccctctcgatgaaaaagatcccttgcttcgcggagaaattgattataggcctctctatcctggggccgcaaatattcaaagtcgaaatgaatgtcacggaagccatatctcttggcattctccactatttcatttagaagccttctttttacagtttcgtcgttcaaaaggatccggccaagttcatcactaaatgcctggttttctaggttcgttataatcatcatcaatgttgtattttgactttctgtaatgctccttaaattcgttaaaggcggtgcgactaaggttccgttccgctgtgcctggaagctgaatgcgccaaggtacgttaagtagggcgacgcttctctggccgcctgctggagattttcgctgacttgatttcctcggggctccaaataagcatttgattcgatgtctcgtttaggggctggtgggatgtatatacggaaaccaatctgaagcacggtatttaactggatgcggttaacccttgcgagctcggctgctgttgtattgaactgccgggcgatggatgtcagggtatcacctcgcttcacatcatagaactggccggctattggaatgacaatggtttgtccgacaacaaggctgtcgggattcggtatttcattcgtttcagtgatctcatttgcggttgttctgtattgtgaagcgatagcagaaagagtgtcgccttgttttaccacataaatttgaatgaaaaacgcctcctttcatatcgctatcaatgtatgaaagaaaagcgctgatcatgtttatttttctgtaatttgttcttccgtcgtaatttctgcgaaaagaacattctccatcatagttaaggcgaattcgttatcttcgtcactgtttgacgcgatacagtccttaggaatcgtgatgctgtattccctcatataagcgtcattagcggtaaacagcacacatatattgccggctatacctgttaagataatatgtctcacctgcaactcagtaagaagggtgtgaagtgcagtttcgtagaaagcggaatgttttggtttgattaaaaaataatcagcatcttccggggctatcttagtgatgatatccttgcttctttcatttgtgcattcttgctgaatgtttttaatgtcagcttgccaaagtccataatgatcattgatgtaaataatcggccattcattttgtctcgcgtgctcctttaatgataaaatatgaggaacgattttttctgtttttttagcgagggtttctcccatatcgaattcaaaattattgatcatgtctacaatgagaagggctgtatctgctttggacaatcgacagtctcctttccgtttcagttatagttaatatgtagcctttttaggcaatgaaaaaactttgaaaagagagcttatccttatgacacaagatgaactttatatgaaagaagcaattaaagaagcgaaaaaggctgaagagaaaggtgaagtgccaataggtgcggtgcttgtcgttaatgatgaaattatagcgcgtgcacataatttaagagagactgagcaacgatctattgcccatgcagaaatgcttgtgattgatgaagcgtgtaaggcactgggaacatggcggctggaaggtgcgactctttatgtgacgcttgagccttgtccaatgtgtgctggtgcagtcgtactttctcgagtggaaaaagtggtttttggcgcatttgatccgaaaggcggctgttcaggcacgctaatgaaccttctccaggaggaacgctttaatcatcaggctgaagtggtgagcggtgtacttgaggaagaatgcggcggaatgctcagtgcgtttttcagagaactaagaaaaaagaagaaagctgccaggaaaaacttgtctgaatagtacggttgcaatttttaggggaaacagatatacttaagtgtgcatcgtaatagatgcaacataaaatttgatatttattttgccgtgctaagcggggaggtagcggtgccctgtacctgcaatccgctctagcagggccgaatcccttctcgaggttcgtttactttaaggcctgccttaagtaagtggtgttgacgtttgggtcctgcgcaatgggaattcatgaaccatgtcaggtccggaaggaagcagcattaagtgaaacctctcatgtgccgcagggttgcctgggccgagctaactgcttaagtaacgcttagggtagcgaatcgacagaaggtgcacggtaaatcaatcatcaaattttcagactcacctaatattaggtgagttttttgttatgtaaaaagagcttttggaatcgaaacaaggttcatgtataatgggaatgatgaataacggaggagggcaaacccgtgagttaccaagctttatatcgagtattcaggcctcagcgctttgaagatgtggtcggacaagaacacattacaaaaacgctgcaaaatgcccttttgcaaaaaaagttttctcacgcctatctgttttccgggccaagaggaaccggaaaaaccagtgcagccaaaatatttgctaaggctgtcaactgtgaacatgctcctgttgatgagccatgcaacgaatgtgcggcctgtaaagggataacaaacgggtcaatatccgatgtcatagaaattgacgccgcttctaataacggtgttgatgagattcgtgacattcgcgataaagtgaagtttgccccgtcggccgtcacatataaggtatatatcatagatgaggtgcatatgctttctatcggcgcttttaatgcattactaaaaacattagaagagccgcctgagcattgtattttcatattagcaacaactgaaccacacaaaattcctttaaccattatctctagatgtcagcgttttgactttaaacgaattacctcccaggcgattgtaggccgcatgaataaaattgttgatgctgaacagctgcaagtggaggaaggatcgctggatatcatcgcgagtgctgcagacggagggatgagggatgccctgagccttcttgatcaggccatatcattcagcggcgatatcctgaaagtcgaagatgcgcttttaattacgggtgctgtttctcaattatatatcgggaagcttgcacaatccctgcatgataaaaacgtttctgacgcactggaaacattaaatgaattgcttcagcaaggaaaagatccagctaagctgatagaagatatgattttctatttcagggacatgctgctgtacaaaacagcccctggcttagagggagttcttgagaaagtaaaagttgatgaaacgttccgggaactaagtgaacaaattccggctcaggccctatatgaaatgattgatattctgaacaagagccatcaggaaatgaaatggacaaatcatccgcgtatctttttcgaagtggccgttgtgaagatttgccaaacctcacatcaatctgctgctgatctcccggaagtggatatgctgatgaaaaaaatccagcagctcgaacaggaagtagagcggctcaaaacaacgggcataaaagcagctgcggaaagcccgaaaaaagaagcgccgcgtgtgccaaagggcgggaaatccaattacaaagcgccagtaggcagaattcatgagattttgaaggaagccacaagaccggatcttgatctgctcagaaacagttggggcaagcttcttgctcatctcaaacagcaaaacaaagtatcacatgccgctttactgaatgacagtgaacctgtggctgccggatcggcggcatttgttctgaaattcaaatatgaaattcattgtaaaatggtcgctgaggataacaacggagtccggactaatcttgagcagattttagaatcgatgctcggaaaaagaatggatttgattggcgttccagaagcacaatggggtaaaataagagaagaatttttagaagatcatcagcaggaaaatgaaggatcaaatgaaccggctgaagaagacccgcttattgccgaagcgaaaaagcttgttggagcggatttaattgaaataaaagactaacaaaatgaaagagagtgaatgctatgcgtggcggaatgggtaatatgcaaaaaatgatgaaacaaatgcaaaaaatgcaaaaggacatggcgaaggctcaagaagagcttgcagaaaaggttgttgaaggaactgcaggcggcggtatggtaacagtaaaagcaaacggccaaaaagaaatcctggatgttatcatcaaagaagaagtcgttgatcctgaagatattgatatgcttcaagatttagtgcttgctgcaacgaatgaagctttgaaaaaagttgacgaaatcacaaacgaaacaatgggtcaatttacaaagggaatgaacatgccaggtttattctagggggataaaagaacatgcaatatcctgaaccaatatcaaagctgattgacagctttatgaaattgccagggatcggaccgaaaacagcggttcgtctggctttttttgttctaggtatgaaagaagatgtagtattagattttgcgaaagcattagtaaatgcgaaacgcaacctgacatattgttcagtttgcgggcatattacagatcaggacccttgctatatatgtgaagatacgcgcagggataagtctgttatctgtgttgtgcaagaccctaaggatgttatcgctatggagaaaatgaaggaatacaacggacagtatcacgttcttcacggcgctatttctccaatggacggcatcggaccggaggatattaaaataccagaattgttaaaacgattacaggatgatcaagtgacagaagtgatcctcgcgacaaaccctaatatagaaggggaagcaacggcgatgtatatatcaaggctcctcaagccgtctggtattaagctctcccgtattgcccacggactgcccgtcggcggtgacttggaatatgctgacgaggtcactctttctaaagcacttgaaggaagacgtgaattgtaaggaggaaaaagcgatccatgggttttcttcgcaagaaaacattaagaagagagtttgatgaaaaactaaccgagcagctttttaagcaaaaggaagagtggaacaggcaaaaaaagctggtcgaaaaaagcttagaaccgtctgctgaagtgttatacgaactgaaagtagctgaagcgaagtattttttttacttaagggaagcgaagcagcgaaatttaaaaatcagccggtggaagtaagtggtctaaactcctggatcttctcataagcttgtactagaacaagcgaaggagatgagaagattcatggagcctatttttattattgggattattttaggactggttattcttctttttttatcaggttcaactgcgaagcctttaaagtggatgggcatcacagctgttaaatttgtggcaggtgctttgctgctggtttgtgtaaatatgtttggcggcagtcttggcattcatgtgccgattaatctggttacaacagctatcagcggaattttagggatacccggaatagctgcgttagtcgttattaagcaatttatcatttaattgatattatgtattgacttagacaactgaaggtgttattctaatatacgtcgctgatgacgaacagcttttttgaaaaggaaatgctaaaaagttgttgacagtagcggcggtaaatgttatgataataaagtcgcttaaacgagcggtaaacaaagttctttgaaaactaaacaagacaaaatgtacctgttaattcatttttataaatcgcacagcgatgtgcgtagtcagtcaaactactttatcggagagtttgatcctggctcaggacgaacgctggcggcgtgcctaatacatgcaagtcgagcggacagatgggagcttgctccctgatgttagcggcggacgggtgagtaacacgtgggtaacctgcctgtaagactgggataactccgggaaaccggggctaataccggatggttgtttgaaccgcatggttcaaacataaaaggtggcttcggctaccacttacagatggacccgcggcgcattagctagttggtgaggtaacggctcaccaaggcaacgatgcgtagccgacctgagagggtgatcggccacactgggactgagacacggcccagactcctacgggaggcagcagtagggaatcttccgcaatggacgaaagtctgacggagcaacgccgcgtgagtgatgaaggttttcggatcgtaaagctctgttgttagggaagaacaagtaccgttcgaatagggcggtaccttgacggtacctaaccagaaagccacggctaactacgtgccagcagccgcggtaatacgtaggtggcaagcgttgtccggaattattgggcgtaaagggctcgcaggcggtttcttaagtctgatgtgaaagcccccggctcaaccggggagggtcattggaaactggggaacttgagtgcagaagaggagagtggaattccacgtgtagcggtgaaatgcgtagagatgtggaggaacaccagtggcgaaggcgactctctggtctgtaactgacgctgaggagcgaaagcgtggggagcgaacaggattagataccctggtagtccacgccgtaaacgatgagtgctaagtgttagggggtttccgccccttagtgctgcagctaacgcattaagcactccgcctggggagtacggtcgcaagactgaaactcaaaggaattgacgggggcccgcacaagcggtggagcatgtggtttaattcgaagcaacgcgaagaaccttaccaggtcttgacatcctctgacaatcctagagataggacgtccccttcgggggcagagtgacaggtggtgcatggttgtcgtcagctcgtgtcgtgagatgttgggttaagtcccgcaacgagcgcaacccttgatcttagttgccagcattcagttgggcactctaaggtgactgccggtgacaaaccggaggaaggtggggatgacgtcaaatcatcatgccccttatgacctgggctacacacgtgctacaatggacagaacaaagggcagcgaaaccgcgaggttaagccaatcccacaaatctgttctcagttcggatcgcagtctgcaactcgactgcgtgaagctggaatcgctagtaatcgcggatcagcatgccgcggtgaatacgttcccgggccttgtacacaccgcccgtcacaccacgagagtttgtaacacccgaagtcggtgaggtaaccttttaggagccagccgccgaaggtgggacagatgattggggtgaagtcgtaacaaggtagccgtatcggaaggtgcggctggatcacctcctttctaaggatattatacggaatataagaccttggctcttataaacagaacgttccctgtcttgtttagttttgaaggaactttgttccttgaataagttaagatgggcctgtagctcagctggttagagcgcacgcctgataagcgtgaggtcggtggttcgagtccactcaggcccaccatcttatataacggggccttagctcagctgggagagcgcctgctttgcacgcaggaggtcagcggttcgatcccgctaggctccaccaacgtgttctttgaaaactagataacagtagacatcacattcaattagtaacacaagatatcacatagtgattctttttaacggttaagttagaaagggcgcacggtggatgccttggcactaggagccgatgaaggacgggacgaacaccgatatgcttcggggagctgtaagcaagctttgatccggagatttccgaatggggaaacccaccactcgtaatggagtggtatccatatctgaattcataggatatgagaaggcagacccggggaactgaaacatctaagtacccggaggaagagaaagcaaatgcgattccctgagtagcggcgagcgaaacgggattagcccaaaccaagaggcttgcctcttggggttgtaggacactctatacggagttacaaaagaacgaggtagatgaagaggtctggaaaggcccgccataggaggtaacagccctgtagtcaaaacttcgttctctcctgagtggatcctgagtacggcggaacacgtgaaattccgtcggaatccgggaggaccatctcccaaggctaaatactccctagtgaccgatagtgaaccagtaccgtgagggaaaggtgaaaagcaccccggaaggggagtgaaagagatcctgaaaccgtgtgcctacaagtagtcagagcccgttaacgggtgatggcgtgccttttgtagaatgaaccggcgagttacgatcccgtgcaaggttaagcagaagatgcggagccgcagcgaaagcgagtctgaatagggcgcatgagtacgtggtcgtagacccgaaaccaggtgatctacccatgtccagggtgaagttcaggtaacactgaatggaggcccgaacccacgcacgttgaaaagtgcggggatgaggtgtgggtaggggtgaaatgccaatcgaacctggagatagctggttctctccgaaatagctttagggctagcctcaaggtaagagtcttggaggtagagcactgattggactaggggcccctaccgggttaccgaattcagtcaaactccgaatgccaatgacttatccttgggagtcagactgcgagtgataagatccgtagtcgaaagggaaacagcccagaccgccagctaaggtcccaaagtatacgttaagtggaaaaggatgtggagttgcttagacaaccaggatgttggcttagaagcagccaccatttaaagagtgcgtaatagctcactggtcgagtgactctgcgccgaaaatgtaccggggctaaacgtatcaccgaagctgcggactgttcttcgaacagtggtaggagagcgttctaagggctgtgaagccagaccggaaggactggtggagcgcttagaagtgagaatgccggtatgagtagcgaaagaggggtgagaatcccctccaccgaatgcctaaggtttcctgaggaaggctcgtccgctcagggttagtcgggacctaagccgaggccgaaaggcgtaggcgatggacaacaggttgatattcctgtaccacctcctcaccatttgagcaatggggggacgcaggaggatagggtaagcgcggtattggatatccgcgtccaagcagttaggctgggaaataggcaaatccgtttcccataaggctgagctgtgatggcgagcgaaatatagtagcgaagttcctgattccacactgccaagaaaagcctctagcgaggtgagaggtgcccgtaccgcaaaccgacacaggtaggcgaggagagaatcctaaggtgatcgagagaactctcgttaaggaactcggcaaaatgaccccgtaacttcgggagaaggggtgctctgttagggtgcaagcccgagagagccgcagtgaataggcccaggcgactgtttagcaaaaacacaggtctctgcgaagccgtaaggcgaagtataggggctgacgcctgcccggtgctggaaggttaagaggagcgcttagcgtaagcgaaggtgcgaattgaagccccagtaaacggcggccgtaactataacggtcctaaggtagcgaaattccttgtcgggtaagttccgacccgcacgaaaggcgcaacgatctgggcactgtctcaacgagagactcggtgaaattatagtacctgtgaagatgcaggttacccgcgacaggacggaaagaccccgtggagctttactgcagcctgatattgaatgttggtacagcttgtacaggataggtaggagccttggaaaccggagcgccagcttcggtggaggcatcggtgggatactaccctggctgtattgaccttctaacccgccgcccttatcgggcggggagacagtgtcaggtgggcagtttgactggggcggtcgcctcctaaaaggtaacggaggcgcccaaaggttccctcagaatggttggaaatcattcgcagagtgtaaaggcacaagggagcttgactgcgagacctacaagtcgagcagggacgaaagtcgggcttagtgatccggtggttccgcatggaagggccatcgctcaacggataaaagctaccccggggataacaggcttatctcccccaagagtccacatcgacggggaggtttggcacctcgatgtcggctcatcgcatcctggggctgtagtcggtcccaagggttgggctgttcgcccattaaagcggtacgcgagctgggttcagaacgtcgtgagacagttcggtccctatccgtcgcgggcgcaggaaatttgagaggagctgtccttagtacgagaggaccgggatggacgcaccgctggtgtaccagttgttctgccaagggcatcgctgggtagctatgtgcggacgggataagtgctgaaagcatctaagcatgaagcccccctcaagatgagatttcccattccgcaaggaagtaagatccctgaaagatgatcaggttgataggtctgaggtggaagtgtggcgacacatggagctgacagatactaatcgatcgaggacttaaccacattttgaatgatgtcacacctgttatctagttttgagagaacactctcaatttgtttggtggcgatagcgaagaggtcacacccgttcccataccgaacacggaagttaagctcttcagcgccgatggtagtcgggggtttccccctgtgagagtaggacgccgccaagcaagtttaaacccagctcattgagctgggttttttgtttacttaagatcgagaaaatcaaacaaatacaaacaccgagggcttatatagcccatatactgatttaaagtttcaaaaaggtctaaatagtgtatacaatatccgttttaaggggaggctaactgtacggaggtggagaagatggacgaaacagttaaacttaatcatacatgtgtgatttgtgatcaagagaagaatagaggcattcatctttatacgaaattcatatgcttagattgtgagagaaaagtaatttctacatcaacttctgatcctgactatgcgttttacgtaaaaaaactaaagagcattcatacaccgccattatattcatagacctgaaaaggtctttttttgtactcttaataataaaaagaagatgaaacttgtttaaggattgaacgtagtagataataatattaaaactgagtatagacacaggagtcgattatctcatgcagagattttttcactttttgatgtggagtttaactagcagtgcgacttttgttttcattggaatattgagcttttttggtttaaaccagtcgctttttttatctattgtttatgggcttgcttctggagcagccgtatatatagctggcatctggaatgcaagacggttatttcttaaaaagcatgaattgacaggaagagagtatgcttacattaagaaaaacttagaggaagcaaggcagaaaatgatccgtcttaggaaagccttgtttcaggctaaaagcattcaaatgtttaagcaaaatgcagaaatgctaaggattgtgagaaggatttatctcctcaccaaaaaagagccaaagcggttttatcaggcagaacgatttttttatcaaactctcgattcggttgttgaattaacagagaagtatgcttttctatcatctcaccccaaaaaaagcaaagaactttcgatgtcgttaagtgagacacgcatcactcttactaaattgaccaagcgtttagaggaagatttaactcaagtaatgggtgatgaaattgacgagttgcactttgaattagacgcagcaaaacattcattaaagaaataagggaagagggtaagagcgatgaaccgagaccaaagcgaccttcatatagatgaattattggcagatccttttggtggtaacatagagataccaggttcggaggctgtaaaagcagagaaagagcaagtacggcttgttgatgttcttcctgaggaaaacaagaaaaaagcaattcagcttgctggacagattgatcataaaaatatgcaaagcattgtcttatacggttcacaagctcaatctaaactgctgaacttttctcatgatatgattaatcatgttcaaaagaaggatgtcggggaaattggcgaaatacttggagagctgatgaaaaagctggagcaagtaaatcctgatgatctccaatctaagaaaaagggttttttggcacgcatgtttggaagagtatcaagttctcttcaagaggtgctgtctaaataccaaaagaccagtgtgcagatagacaaaatcagcttgaagctggagcactctaaaaatgctttaattagtgacaacaagctgttagagcagttatatgaaaaaaataaagaatattttgccgcgctgaatgtttatattgctgcaggagaactgaagctggaggaattaaaaacaaaaacgattcctgaactgaagcaacaggctgaatcgagtgatcataaccaaatggccgttcaagaggtgaatgatttaattcaatttgctgaccggttagataaaagggtgcatgatttgctgctgagcaggcaaattacaatccaaagtgcaccgcaaatcaggctgattcaaaacacaaaccaagcgttagcagaaaagattcagtcatccattgtgacagcgattccgctatggaaaaatcaagttgccattgcactgacgcttttaaggcagcgcaatgcagtggatgcacaacagaaagtatctgatacaaccaatgagcttttgctgaaaaatgcggagcttttaaaaaccaatacaattgaaactgtacgagcaaatgaacgaggccttgttgatatagataccttaaaaaaggtgcaggaaagcttaataagcacgcttgaagaaacactgactatacaagaagaaggacgaatcaaacgccgtcaggcagaagaagagctgatgatgatggaaggcgacctaaagcaaaagctgcttacaataaaggaaagatagttaccagtaagtctggctttaagttctgtcagaggcacgatataataaggtgtaagaagacacattcaaaggattgttttcatgaacacacctttatataaagcattaattcaacatgcgagaagaaattctcattcatttcatgttccgggacatcacaatggagatgtcttttttgatgacgctaagtcaatattcaatccgcttctcaccattgatgtaactgaactggcaggactggatgatctccatcatccttctggggtgattaaggaagctcaggagcttgccagtcaattatatggatcggcggaaagtttttttctggtaaatggtacgactgtcggaaacttagcgatgattttatctgtttgtgaacctggtgatacaattctggttcaaagaaactgtcataaatctgtatttcatgctgttgatttgtccggtgctgagccggtttatcttgcacctgacgttgattcagcgatgcatgtgcctacgcatgttccgcttggaacaattaaagaggccctggaagcatatccagatgcgaaaggcttggtactgaccaatccgacatattacggacatagtgctgatttgactgagatcattactgaagcccatcattacgggattcctgttttggtcgatgaagcgcatggcgcacattttattttaggtgagccttttccggtctcagctttaaaaatgggggcagatattgttgttcagtcggcccacaaaacgttgcctgccatgacgatgggttcttatttgcatctcaacagcagctgcaggattaacagggatcgggtggcagagtatttaaaccgattacaaagcagcagcccgtcttatccgattatggcttcgttagatattgcccgcgcttatgtacagcatattatagaagaacaaaagctttctgacattctgcagcggatagaaacacttaaacaaacgtttgattcacttacaaatgcagaagctgttaaccctgctaatccactgatcatcacggatccgctaaagctcacaattcgttcaaaacgcggacattctggctatacgctgcaaagcatattagagcgtgccaacatattcactgagcttgctgatgaaaatcaagtactgctcgttctcccattgggaggaaaacggagaataaatgctgaaaccattagaagcattgatgaagagattgagaaaacgcctccggatcaggcgtttgtttctgcagaatggggagtgcagcctgttactgtcttgccttatccaaaaaaggtcttacattcgtttaagaaagaatatgtggactttgaggaagcagctggccggctgaatgcagaagatatcatcccttatcctccgggtatcccgatgattatggcgggagaaagaataacaaaagaaagtgtgcaaaagctcagccgcttgatcagcatgaaaacgcatgttcaagggaatatgaaaatcaaagagaaacaactacttgtttatatagaagaggagaaatcatgagcggtttatttattacattcgaaggtcctgaaggtgcagggaaaacgactgttctgcaggagatcaaaaacatactgacagcagaaggccttcaggttatggcaactcgagagccaggcggaatagatattgcagaacaaattcgagaggttattctgaatgagaacaatatattaatggacccaaaaacagaagctctcttatatgcggctgcaagacgccagcatttagttgaaaaagtaaaacctgctttagaacagggggttatcgttctttgcgacagattcatagacagttctcttgcgtatcaaggatatgcaagagggcttggaattgatgaggttctgtccattaatgaatttgccattggagatatgatgccccatgtaacggtttatttttcaattgatccggaagaaggactgaagcgtatttacgcaaacggctcacgggagaaaaacaggctcgatttagaaaaactggactttcatacaaaagtacaagaaggttatcaagagctgatgaagcgatttccggaaagatttcattcagttgatgccgggcaatccaaagacctcgtcgttcaggatgttctaaaggtgatcgatgaagcgttgaaaaaaattcaattgtgacctgtttcccaatagttgatataataatgtaaacgagatcacgttgtttccaatctaaaggaggccttcacagatgaaattgatagtggcagttgtacaagatcaggacagcaacagacttttgaaaaccttaacggatcacaacttcagagtcacaaagcttgcgacgacaggaggatttcttaaatcaggcaatacaacgtttatgatcggtgtcgaggatatacgcgtcaataaagcgttgagtctcattaaagaaaacgggcagaaacgtgatcagatgattgcccctgtatctccaatgggtggaaatgctgattcctatgtcccttatccagtcgaagttgaagttggcggagcgacagtatttgtccttccagtcgatgaatttcatcaattttaaggatctgaaactgtgaaaattaataaagatatacgtacatttatagataataagcagattccctctgtgaaaacatctgagatcacggcatcgtttaaaacatcaatggaaaaccaaagcagcaaaatgaagcttgatcagcttaccaggttgttatctgatatagaagcattcggaaaaaggctaacgaaatctcggaattttaaagacttagcgagatttaaaggacttgtgaaacgttttgtcaaggaagctgtggacagcggcctttcacatgaaacatcgaaaagctttgacctttacgggaacagcagaacgctgggacttgtgaaagaaatagatgacaaattgatacagcttacggaagagatgatggatcaggaaaaaccggcaattgatttgctggagcgtattggcgaaataaaaggtttattaattaacctttacacatagagagtgatacaatggcaatatcctggaaggaaatgaacgagcttcagcccagagtgatgaagcttttatataatagtattgagaaggacagactatcacacgcttatttgtttgagggaaaaaaaggaacaggcaagcttgatgccgcgctgcttcttgcaaaaagcttcttttgtctggaggatggcgcggagccttgtgagagctgccgaaactgtaaacggatagagtcagggaaccatcctgatctccatcttgttcagcctgatggcttatcaatcaaaaaggcgcaaattcaagcgctccaagaagagttttctaagacaggacttgaatcgcataaaaagctgtatattatttcgcacgcagatcaaatgacagcaaatgcggcgaacagcctgctgaaatttttagaagaacctaacaaagacacaatggccgtcctcatcactgagcagccccaaaggttattggataccatcatttcaagatgccaaacccttccttttcagcctttgcagccgaaagcaattgaagatagactgatcgaacaggacgtctcgcctcatatggcaaggcttctagccaacatgaccaataatgtagcagaagcagtcgaattaagtcgaaatgatgagtttgcagagtctagagcgaaagtgataaaattgtatgaagtcctacaccagcggaaaggacatgcttttttctttattcaagatcaatggatgccctttttcaaagaaaaaacccatcaagaaatgggtcttgatatgctcttattgatatatcgtgatgtgttgtccatccaaataggaaatgaagataaattgatttatcaagacttattccaatcaataaaacagcatgcgctacaatcaacacaacaaagcgttacgaatcagatacttgctgttttagaagcaaagaaacggcttcattccaatgtgaatgtacaaggattaatggagcacttggtgttaatgttgcaggagggataagcttgtacaatgtaattggtgtccgctttaagaaagcgggtaaaatatattattttgatccgaatggatttcatatagaacatgacagctgcgtaattgtagaaactgtcagaggcgttgagtacggccaggtcgtaattgcaaataaacaggtggatgagcatgatgtggtgcttccccttcgaaaagtgatacgtgtggctgacgagcgcgatcttctcattgtagaagaaaataaacaggaagcactatcagcatttgatatctgccaaaagaaagtgattgagcatggcttggatatgaagctggtcgatgttgaattcacgtttgatcgcaataaagtcattttttacttcactgctgacggccgagtcgactttagagagcttgtaaaggatttggcttctatctttaagacaagaattgagctgcgccaaatcggagtgagggatgaggcaaaaatgctcgggggaatcggtccttgcggaagaatgctttgctgttcaacgtttcttggagattttgaacctgtttccattaaaatggccaaggatcagaacttgtctttaaatcctacgaagatttcgggtctttgcggacgattgatgtgctgtctaaaatatgagaacgatgagtatgagacggcaaaagaacagcttccggatataggagaaatgattacgacagcaaacggtcccgcgaaggtcgtcggactaaatattctggaacgggtgcttcaggtggaactgataaaccgtgaaaaagtgatagaatatacttgggaagagctcttggaagagggcgtcgtatccgcacaaaccacagattaacgaggtgtggaaccttggataaaaaagagttatttgatacagtcattaacttagaagaacaaattggctcactgtacaggcagctgggggatttgaagcagcatatcggtgagatgattgaggaaaatcatcatttacagcttgaaaacaagcatttgcgcaaacggctggacgatacgacgcagcagattgaaaagttcaaagctgataaaaaagaatcaaaaacacagaagacagagcaaactgatataggggaaggatatgataatctggcacgtctgtatcaagaaggatttcatatctgcaatgtccactatggtagtgttcgaaaagaagattgtcttttctgtctgtcattcttaaataaaaaatagggaaaaggcttccgcataagacgggagcctttttcaaaggtactgaaaggataagaagatggtttcattacatgatgatgaaagattagattatttgctggcagaggacatgaaaatcatacaaagcccaacagtgtttgctttttcgttggacgctgtgcttctgtccaaatttgcgtacgttccgattcaaaaagggaaaatcgttgatttatgcaccggcaatggtattgtgccgctgctgctcagtacaagatcaaaagcagacattctgggagtcgaaatacaagaaaggctgcatgatatggctgttcgcagcgtggagtataataagttggacgatcagattcagatcatacatgatgacctgaaaaacatgccggagaaacttggacataatcgatatgatgttgtcacctgcaatccgccgtattttaaaacaccgaaacaaactgaacaaaacatgaatgagcatctccgaatcgcaagacatgaaatccactgcacactggaggatgtcatttcagtcagcagcaagctgctcaagcaagggggaaaagcagctcttgttcaccggccgggaaggcttctggagatttttgaactgatgaaggcttatcaaatcgagccaaaacgtgtacaatttgtctatccgaagcaagggaaagaagccaataccattttggttgaaggtatcaaaggcgggcgcccggatttaaaaattcttcctcccttattcgtttatgatgaacaaaatgaatatacaaaagaaatcaggaccattttatatggagacaaataaccatttcttctacgtcgtgaaatgtaaggacaatagctggtatgccggatataccaacgatctgcataaacgagtgaaaacgcacaatgatggaaagggcgcaaagtacacaaaagtaagacgtccggttgaattaatttttgccgagagcttttcaacaaagcgggaagctatgcaggcggaatattatttcaaaaaactaactcggaagaaaaaagagctttatatagaagaaaagcggaacagcaaggaggctgtatatgttaaggcgccaaatgagctttaatggaaagtcggacatggggattctttacttggtcccaaccccaatcggaaatctagaggatatgacattccgggcgatcgacacgctgaaatcggtggatgcgattgctgcggaagatacgaggcaaacgaaaaagctttgtcatgtatatgaaattgaaacaccgctcgtcagctatcacgaacacaataaagaaagcagtgggcacaaaattattgaatggctgaagtcgggaaaaaacattgctcttgtcagtgatgccggtctgccgacgatttctgatcccggagcggaaattgtaaaggattttacggatataggcggttatgttgttccgttgccgggagcaaatgccgcattaacagctcttattgcttcaggtattgtaccgcagccttttttcttttacggttttctcaacagacagaaaaaagaaaagaagaaggagcttgaagcccttaaaaaacggcgggaaacgatcattttttatgaagcgcctcacagattgaaggaaaccttgtcagcgatggcagagatattaggagatcgggaaattgctgtaacgcgtgaactcactaagaaatatgaagagtttatccgaggaaccatatctgaggtcattggatgggcaaacgaagatcagatacgcggcgagttttgtcttgtcgtagaaggaagtaataatgaagaggtagatgaggaagaacaatggtgggaaaccctcactgcgaaagaacatgtcgagcattacatctcgaaaggcgctacgtctaaagaagccattaaaaaagcagcagtcgatcgcaatgtaccaaagcgtgaagtgtacgatgcttaccatattaagcaataaaaaaacgttcttgtgtcataacaagaacgttttttgtacaagaaatgattatttaaggttttgaagctggttttggatttcgctgatgatttgctcagcgccttctttactaagaaccaatttaccgcctgcaagtttaaggttatcatcagaaacttcaccagttacttggcaagtcatgtttggtttatattttttaaggatgattttttcatcatcaacatagatttcaagagcatctttttctgcgattccaagagtacgacgcagttcgataggaataactacacgtcctaattcatcaactttacgtacaataccagtagatttcataaacattctcctcccaagagatacttatttgtttaaattatatttttcttcgtcattattcgacaaaatccttaccttcatagcataacaaggtttccaataatcgtcaatcattttgtttactattgattgtaagaattagttcttatagtcagtaatgtcttagaaactaccgaaataacagcattttataaatatttaataaagctattatcctactaaaaatccttttaaatcaagactttcgaaccaaagttttttatttcatttgattatatacgacaaaattcgacacgaacagactttttttattttcattaaagatttttaattttaattattctttttcagggcgtatgtatatattcttgatcttaaaggctaagatggtatcatagataaaggataaatataaataatattcatatatgatttgcacttatcgccgctctcgtcctttgggcgggagctttttgacattctgattaggaggtttcaagatgccgcaagaaaacaatacattttacattacaacaccgatttattatccgagcggaaaattacatatcggccatgcatatacgacagtcgcgggagatgcaatggcacgttacaaaagattaaaagggttcgatgttcgctatttaacgggaacggacgagcatggacaaaagatccagcaaaaagctgaacaggaaaacattacacctcaggagtatgtggatcgcgcagcggcagatattcaaaaactgtggaagcagcttgaaatctcaaacgacgactttatccgcacgacagaaaaacggcataaagttgtcattgaaaaggtgtttcaaaagcttcttgataacggggacatctatcttgatgagtatgaaggctggtacagcatccctgatgaaacgttctacacggaaactcagctcgttgatattgagcggaatgaaaagggagaggtcatcggcgggaaaagccctgacagcggtcacccagttgaattgatcaaagaggaatcttatttcttccgcatggggaaatacgcggatcgtcttctgaaatactatgaagaaaacccgacattcattcagccagaatcacgcaaaaacgaaatgattaataactttatcaaacctggacttgaggatttggcagtatcacgtaccacttttgattggggcgtgaaggtgccggaaaatccaaagcatgttgtatatgtttggattgacgcactatttaactatttaacggcactcggttatgatacagaaaatgatgagctttatcaaaaatattggcctgccgatgttcatttagtcggtaaggagattgtacgattccatactatttactggccaattatgctgatggcgctggatcttccgctgccaaagcaagtattcgcgcatggctggcttttgatgaaagacggaaaaatgtcgaaatcaaaaggaaacgttgtagatccggttacattaattgagcgctatggtttagacgagcttcgctattacctgcttcgcgaagtgccgttcggatctgacggagtattcacgccggaaggatttgttgagcggattaactatgatttagcaaatgatttaggaaatctattgaatcgtactgttgcgatgattaataagtattttgacggacaaatcggttcttacaaaggtgctgttacggaatttgaccatacgctaacttctgttgctgaagaaacagtaaaagcttatgagaaagcaatggaaaatatggagttctcggtagcactttcgactttatggcagctcatcagccgcacaaacaaatacattgatgagacagctccatgggtgcttgcgaaagatccggcaaaagaagaagaattgcgatcagttatgtatcatctcgctgaatcattgcgtatttcagcggtactgcttcagccattcttaacaaaaacacctgaaaaaatgttcgagcagctgggcattactgatgaatctttaaaagcttgggacagcattacagctttcggccagctgaaagatacaaaagtacaaaaaggcgagccattgttccctcgtttagaggcagaagaagaaattgcttacatcaaagggaaaatgcaaggttcagcaccagcgaaagaagaaacaaaagaagaagagcctcaagaggtcgatcgtttacctgaaattacgattgatcaattcatggatgtagagcttcgcgtagctgaggtcattgaggcagaaccagtgaaaaaagcagaccgtttattgaagctgcagcttgatcttggttttgaaaagcgccaagtggtatccggcattgcgaagcattatacgcctgaagagcttgttggaaaaaaactcgtttgtgtaacaaatctaaaaccggttaaactcagaggagagctttctcaaggtatgatccttgcaggagaagcagacggcgttttaaaggtcgtgtctatcgatcagtcgttaccaaaaggcacaagaattaaataatgataaaacaaaaggtgtttcacgtgtaacaattcgtcgaacaccttttgtgtttcgacaagaaaggagtttttcacttatgttgtttgacacacacgcgcatttaaatgcagaacaatatgatactgatcttgaagaggttattgaacgggcaaaagctgaaaaagttgaacgaattgtcgtagttggttttgaccgtccgacgattacccgtgcgatggaaatgattgaggaatatgattttatttatgcagccattggctggcaccctgttgacgctattgacatgacagaggaagacttagcgtggattaaagagctttctgctcatgagaaagtggtagcgataggggaaatgggactggattatcattgggataaatcacctaaagatattcaaaaagaggtgtttagaaaacaaatcgccttagcgaaagaggtcaatttgcctattatcattcataaccgtgatgcaacggaggatgtcgtgaccattttgaaagaggaaggcgcagaagctgtgggcggaatcatgcactgctttacaggaagtgcggaagtggcaagagaatgcatgaaaatgaatttttatttatcatttgggggaccggtgacatttaaaaatgcgaagaaaccgaaggaagtagtgaaggaaattcccaatgaccggctgctgattgaaacggactgcccgtttctcacaccgcaccctttccgcgggaaaagaaatgagccaagctatgtgaaatatgtggcagaacaaatcgccgaattaaaagaaatgacctttgaagagattgcttccatcacgactgaaaatgcgaaaagacttttccgtataaactgacaaaaaacgctagcgggttttgtaagagcttgtcccttacagcgtttttctataaaagttctacatgctttcttctcctcataggataggtttgtcgacaagtctttcttccgtttctcagtgtatttcaggataatgaagaggacactgagcttttgggagaaagagaagggagggttgacagccttttagatactctatataatctctccgaggagaaggaggcgtttttcatcacacaaaaaatgaaaaagctgttttccgtaaagcttagcaaaagcaaagtcattctggttgctgcttgtttgcttttggcaggaagcgggactgcgtacgcggctcatgagctgacgaaacaatcagtctcagtttctatcaatggcaaaaagaaacatatacgcacacatgcaaatacagtcggtgatcttttggagacgcttgatataaagacaagagacgaagacaagatcacacctgctaaacagacaaagataacagcagacatggacgttgtgtatgaggctgcaaaacctgtgaagcttacaataaacggggaagaaaagacgttatggtcaacagcaaaaacggtcggtgcattactggacgaacaagatgttgatgtgaaagaacaagatcaaattgatcccgtaatagatacagatatttcgaaagacatgaagattaacatagagcccgcatttcaggttactgtgaatgatgcagggaaacaaaagaagatctggacgacttcgactacggtcgctgactttttaaaacagcaaaagatgaacataaaagacgaagataaaatcaagcctgcgttagatgcaaagctgacgaaaggaaaggctgatattacaattactcgtatcgaaaaggtcaccgatgtagttgaagagaagattgcgttcgatgtgaaaaagcaagaagacgcttctcttgaaaaagggaaagaaaaggtcgtccaaaaaggaaaagaaggcaagctaaaaaaacatttcgaagtcgttaaagaaaatggcaaagaagtgtccagagagcttgtaaaagaagaaacagctgagcaaagcaaagataaagtgattgctgtcggcacaaagcaaagcagtccaaaagttgaaacggtcagtgcttcaggtgattcaaaaacagttgtgtcccgcagcaatgaatcaacaggcaaagtcatgactgtatcatctacggcttatacggcaagctgcagcggttgttcaggacatacagcgacaggcgtcaatttaaaaaataatccgaatgccaaagtcatcgctgtggatccaaatgtcattccgctaggctccaaagtccacgtggaaggctatggatatgccattgctgcagataccggttcagcgattaaagggaacaaaatagacgtctttttcccagagaaatcatcggcgtaccgatggggaaataaaacagtcaaaattaaaatcttaaattaatatatacttatgtattcagagggttttgcgccctctgtttttttcgttataatagacaaagtgcattttctgcttattagacgctcgatataagaaaaagtttcatgaatatacaaaagtttttattttgtcttggaggaaataatgaaaattaaagagatcattgtggtcgaggggcgtgacgatacggcccgcatcaaattggctgttgatgcagacacaattgaaacaaatggttcagccatcgatgatcatgtgattgaccaaatccgtttggcccagaagaccagaggcgtcattattttaacggatccggactttccgggagagaagattcgcaaaaccatctcagaggctgtacctggctgtaagcatgcatttttgccaaaacatcttgccaaacctaaaaacaagcggggaattggtgtagagcatgcatcggttgaaagcattagggcatgtttagaaaatgtgcatgaggagatggaagcgcagccgagtgacatttcagctgaggatttgattcatgccggactaataggcgggcctgcggccaaacgccgccgggaacgactgggtgatctgttgaaaatcggctatacaaatggcaaacagcttcaaaaacggctgcaaatgtttcaaattaaaaaaagtgattttatgagtgcgctcgataccgttatgcgggaggaacagaatgaataaagatattgcgacaccgattagaacgaaagagatactgaagaaatacggtttttcttttaaaaagagcttaggacagaatttcttaattgatacgaacattttaaacagaattgtcgatcacgcggaagtgacggagaaaacaggtgtcattgaaatcggcccgggaatcggggctttaaccgaacagcttgccaagcgggcgaaaaaggtcgtggcatttgagattgaccagcgactattgccgattctgaaggatacactgtcaccttacgacaatgtcactgtcattcatcaggacgtgttaaaggctgatgtcaaatcagtcattgaagaacaatttcaagattgtgatgagatcatggtagttgccaaccttccttattacgtaacaacaccgattatcatgaaactgcttgaagaacaccttccgctgaaagggattgtggtcatgctgcaaaaagaagtggctgagcgcatggcggctgatccttcatctaaggaatacggctcgctttcaatcgcggtgcagttttatacagaagccaaaacggtgatgatcgttccgaaaaccgtatttgttcctcagcctaatgtcgattccgcagtcatccgtctgattctccgagacggcccggcagtggacgtggaaaacgaatcctttttctttcagctcatcaaggcaagctttgcacagcgtcgtaaaacgctgctcaataacttagttaacaatctgcctgaaggaaaagcgcaaaaatcaacgattgagcaagtgctcgaagaaacaaatattgacggtaagcgccgaggcgaatccctgtctattgaggagttcgcagcgctgtctaacggattgtataaagcccttttctaaaagggctttttgttttgcgcaccacatggactgccgctacataggctagagaaggacctttcattcaatgataagaaaaaacttggactcagcgaaaaaaggcgctttctcaaggctctttctttcatgatgaggcttagtctatgtgtggagtgaggaatgtgcaatttcaaataggggatatggtagccagaaaatcctatcagatggatgttttgtttcgaattataggaatagagcaaacaagcaaaggaaattcaattgccattttgcatggagatgaagtcaggctgattgctgattcggatttttctgatctggtagcagtgaaaaaagatgagcagatgatgcggaaaaagaaagatgagagcagaatgaatgagtcgctcgaattgctccgccaagattataagctgctcagagaaaagcaggagtactatgcgacaagccaatatcagcatcaggagcattatttccatatgccgggcaaagtgcttcatctggatggcgatgaagcatatctgaaaaaatgcctgaatgtctataaaaaaattggagtgccggtctatggcatccattgccatgaaaagaaaatgtctgcttctattgaagaattgctcgacaaatatcgacctgatatcctggtgatcacagggcatgatgcgtattcgaagcaaaagggcggcattgatgatttgaatgcgtacagacattctaagcactttgttgaaactgttcaaacagcccgaaaaaagatccctcacttagatcagcttgttatttttgcgggggcctgccaatcccattttgaatcactcatcagagcgggtgcgaattttgcgagttcaccgtcaagagtcaatattcatgcgcttgatccggtatatatcgtcgcgaagatcagctttacgccgtttatggaacggattaatgtatgggaagtgctccgtaatacgctgacaagagagaaagggcttggaggtattgaaacaagaggagttctgagaattggtatgccttataagtccaattaacagttgaaaacctgcataggagagctatgcgggttttttattttacataatgatacataatttaccgaaacttgcggaacataattgaggaatcatagaattttgtcaaaataattttattgacaacgtcttattaacgttgatataatttaaattttatttgacaaaaatgggctcgtgttgtacaataaatgtagtgaggtggatgcaatggcgaagacgttgtccgatattaaaagatcgcttgatgggaatttaggtaaaaggctgacgttaaaagcaaacggtggccgccgaaaaacgattgagcgttcgggcattttagctgagacgtacccttctgtttttgtgatacaactagatcaagacgagaactcgtttgaaagagtttcatacagttatgctgatattttgactgagactgttgagctgacatttaatgatgacgccgcaagctcagtggcattttaacgggcagtgaaccttttgtttactgctttttgttttgcccttttttggtttccaataattttaacgaaagttccatctgatttaacaaaagataaaacagtcacatattatcgtgacgtgcacgaatggctatcacttctaaaaaaggggttgtttcgtttgggcagacgtcgtggagttatgtcagatgagtttaaatatgagctggctaaagaccttggtttttatgacacagtaaaaaatggcggctggggcgaaattcgggctcgcgatgccggtaacatggtaaagcgcgctattgaaatcgccgaacagcaaatggctcagaatcagaataaccgataaggatgtgacccgggggacgtgctgttccctggtttttttattttggatataaatacataatgggctgaatatggatatgttcatcctgtacttcaaatgtgatacaatgttcatacttatgtttagatggagaagtaggtgaaagctatgcgtattttagaaaaagcgccagctaagatcaatctgtcacttgacgtcacccgaaaacgcccggatggctatcatgaagtcgaaatgatcatgacgacaattgatttagctgatcgaattgaattgacggagcttgcagaggatgaagtgagggtttcctcccacaaccgatttgtgcctgatgaccaaagaaacttagcttatcaggctgccaagctgatcaaggacagatacaacgtgaaaaagggagtttccatcatgattacgaaggtaattccggtggctgccggtcttgccggcggaagcagtgatgcggcggcgacactcagagggctgaacagactgtggaatttaaatctgtccgcggaaacgcttgctgagcttggagcggaaattggctctgacgtttcattttgtgtctatggcggaactgcattagcaacagggcgcggcgagaaaattaaacatatcagcacgcctccgcactgctgggtcattttagcgaagccgacaatcggtgtttcaactgctgaagtgtacagagcgctgaaactggatggtatagagcatcccgatgtacaaggcatgatcgaggcgatagaagagaagagttttcagaagatgtgcagccgtttaggcaatgtgcttgaatctgttacactcgatatgcatcctgaagttgcaatgatcaaaaaccagatgaaacgctttggtgcagatgccgtgttaatgagcgggagcggcccgacagtgtttggactggttcagtatgagtcgaaggtgcagagaatttataacgggttaagaggcttctgcgatcaagtttatgcggtgagaatgatcggcgaacagaacgctcttgattaaatccgtatgttaagttatattgatcttaaaatattcggattttgggggtaagttcatgaagtttcgtcgcagcggcagattggtggacttaacaaattatttgttaacccatccgcacgagttaataccgctaacctttttctctgagcggtatgaatctgcaaaatcatcgatcagtgaagatttaacaattattaaacaaacctttgaacagcaggggattggtactttgcttactgttcccggggctgccggaggcgttaaatatattccgaaaatgaagcaggctgaagctgaagagtttgtgcagacacttggacagtcgctggcaaatcctgagcgtatccttccgggcggttatgtatatttaacggatatcttaggaaagccatctgtactctccaaggtagggaagctgtttgcttccgtgtttgcagagcgcgaaattgatgttgtcatgaccgttgccacgaaaggcatccctcttgcgtatgcagctgcaagctatttgaatgtgcctgttgtgatcgttcgtaaagacaataaggtaacagagggctccacagtcagcattaattacgtttcaggctcctcaaaccgtattcaaacaatgtcacttgcgaaaagaagcatgaaaacgggttcaaacgtactcattattgatgactttatgaaagcaggcggcacaattaatggtatgattaacctgttggatgagtttaacgcaaatgtggcgggaatcggcgtcttagttgaagccgaaggagtagatgaacgtcttgttgacgaatatatgtcacttcttactctttcaaccatcaacatgaaagagaagtccattgaaattcagaatggcaattttctgcgtttttttaaagacaatcttttaaagaatggagagacagaatcatgacaaaagcagtccacacaaaacatgccccagcggcaatcgggccttattcacaagggattatcgtcaacaatatgttttacagctcaggccaaatccctttgactccttcaggcgaaatggtgaacggcgatattaaggagcagactcatcaagtattcagcaatttaaaggcggttctggaagaagcgggtgcttcttttgaaacagttgtaaaagcaactgtatttatcgcggatatggaacagtttgcggaagtaaacgaagtgtacggacaatactttgacactcacaaaccggcgagatcttgtgttgaagtcgcgagactcccgaaggatgcgttagtcgagatcgaagttattgcactggtgaaataataagaaaagtgattctgggagagcccgggatcacttttttatttaccttatgcccgaaatgaaagctttatgacctaattgtgtaactatatcctattttttcaaaaaatattttaaaaacgagcaggatttcagaaaaaatcgtggaattgatacactaatgcttttatatagggaaaaggtggtgaactactgtggaagttactgacgtaagattacgccgcgtgaataccgatggtcgcatgagagcgattgcatccatcacgctggatcacgaatttgttgtacatgatattcgtgtgattgatggaaacaatggtcttttcgttgcgatgccgagtaaacgcacccctgatggagagttccgcgatattgctcatcctattaattcaagcacgcgaggaaagattcaagatgccgtgttaaatgagtatcatcgtctgggtgacactgaagcattagaattcgaagaagctggagcttcttaaaaaataaccaaaaagcaaggactgctgaaagggctgacataagccttttgccggcggtccttttttaattctgatttttcaaacttagttgcactcaatagaaaattcttgcacttcatgaagtctccttgaaatcagaagatatttaggatatatttttctatggataaaagggatattggaggccaataaatggataagcggtttgcagttgttttagcggctggacaaggaacgagaatgaaatcgaagctttataaagtccttcatccagtttgcggtaagcctatggtagagcacgtcgtggacgaagccttaaaattatctttatcgaagcttgtcacgattgtcggacatggtgcggaagaagtgaaaaagcagcttggtgataaaagcgagtacgcgcttcaagcagaacagcttggcactgctcatgctgtaaaacaggcacagccatttcttgctgacgaaaaaggcgtcacaattgtcatttgcggagatacgccgcttttgacagcagagacgatggaacagatgctgaaagaacatacacaaagagaagcgaaagctacgattttaactgcggttgcagaagatccaaccggatacggccgcattattcgcagcgaaaacggagcggttcaaaaaatcgttgagcataaggacgcctctgaagaagaacgtcttgtaactgagatcaacaccggtacgtattgttttgacaatgaagcactatttcgggctattgatcaggtgtctaatgataatgcccaaggcgagtattatttgccggatgtcatagagattcttaaaaatgaaggcgaaactgttgccgcttaccagactggtaatttccaagaaacgctcggagttaatgatagagttgctctctctcaggcagaacaatttatgaaagagcgcattaataaacggcatatgcaaaatggcgtgacgttgatcgacccgatgaatacgtatatttctcctgacgctgttatcggaagcgatactgtgatttaccctggaactgtgattaaaggtgaggtgcaaatcggagaagatacgattattggccctcatacggagattatgaatagtgccattggcagccgtacggttattaaacaatcggtagtcaatcacagtaaagtggggaatgatgtaaatataggaccttttgctcacatcagacctgattctgtcatcgggaatgaagtgaagatcgggaattttgtagaaattaaaaagactcaattcggagaccgaagcaaggcatctcatctaagctatgtcggcgatgctgaggtaggcactgatgtaaacctgggctgcggttcaattactgtcaattatgatggaaagaataagtatttgacaaaaattgaagatggcgcgtttatcggctgcaattccaacttggttgcccctgtcacagtcggagaaggcgcttatgtggcggcaggttcaactgttacggaagatgtacctggaaaagcacttgctattgccagagcgagacaagtaaataaagacgattatgtgaaaaatattcataaaaaataatcctaaattcggaggtttatccatgtctaatcaatacggagataagaatttaaagattttttctttgaattcgaatccagagcttgcaaaagaaatcgcagatatagttggagttcaattagggaaatgttctgtcacaagatttagtgacggggaagtccaaattaatatcgaagaaagtattcgcggatgtgattgttacatcatccagtctacaagtgaccccgttaacgagcatattatggaactgctgattatggtagatgcgttaaaacgcgcttctgcaaaaacgattaacattgttattccttattacggttatgcgcgtcaagacagaaaagcaagatcccgtgagccaatcacagctaaacttttcgctaacctgcttgaaacagccggtgcgactcgtgtgattgcacttgacctgcatgcgccgcaaattcaaggattctttgatataccgattgaccacttaatgggtgttccgattttaggagaatattttgaaggcaaaaatcttgaagatatcgtcattgtttcacctgaccatggcggtgtgacacgtgcccgcaaactggctgaccgactaaaagcgccaattgcgattattgataaacgccgtccgcgtccaaacgtggcggaagtcatgaatattgtaggtaacatcgaagggaagactgctatcctcatcgatgacattattgatactgcaggtacgattacacttgctgctaatgcgctcgttgaaaacggagcgaaagaagtatatgcatgctgtacacaccctgtactatcaggccctgcggtagaacggattaataattcaacaattaaagagcttgttgtgacaaacagcatcaagcttcctgaagaaaagaaaattgaacgctttaagcagctttcagtcggaccgcttctggcagaagcaattattcgcgttcatgagcagcaatcagtcagctaccttttcagctaaaccgattttgaaaggtttaaacctttatcgttttgggtattgtttgtaataggacaactaaaacgacaataggatggtgctgaatatggcaactttaacggcaaaagaaagaacggactttactcgttcgtctcttcggaatatccgtacttcaggacatgttccaggtatcatatatgggaaggatacgggtaacaaacctgtgtcattagacagtgtggagctcatcaaaacgctgagggacgaaggcaaaaatgcagtcattacgcttgaggtcagcggagaaaaacactcagtcatggtaacagacctgcagacggacccgctgaaaaatgaaatcactcatgctgattttcaagtagttaatatgagtgaggacattgaagtggaagttccgattcatctgaccggagaagccattggagtgaaaaacggaggcgtactgcagcagccgttatatgcacttactgtaaaggccaagccaaaagccattccgcaaacgattgaggctgatatttcaagcctcgatgtaaatgaagtactgacgattgcagatttgcctgctggcggtgactactcctttaatcatgaatcagatgaggttgtggcttcaatccttcctccgcagcagcaggaagcagctgaggtcgatgaagaggaatctgccgatgctcagccagaaggtgaaaacgaacaataatagcttaaggcgtaaccctcccgcggttacgtcttttgtgctagaatgagaagaattatagcccgtttatgaagacgggagttatgtgactaagggaggattcgccatgcttgtgattgccggtctcggaaacccggggaagaactatgaaaacacacggcataatgtcggatttatggtgatagatcagcttgcaaaggaatggaatatagagctgaatcaaaataaatttaacggattatacggaaccggatttgtttccggcaaaaaggttctacttgttaaaccgcttacatatatgaatttatcaggagaatgtttgcggcctttaatggactactatgatgtcgataacgaagatttgacagtcatttacgacgaccttgaccttccgactggcaagatccgtttaagaacgaaaggaagcgccggagggcacaatggcatcaaatcactgatccagcatcttggaacatccgagtttgaccgtatccgcatcggaatcggccggcctgtaaacggcatgaaggtcgttgattatgtgttaggctcctttaccaaggaggaggcacctgagatcgaagaagcggttgataaatctgtgaaggcttgtgaggcttctttgagtaaaccgtttttagaagtcatgaacgaatttaacgcaaaggtataaaatgtaacaacaaagtccatactacaccaaaatgactttttcatcaggaggtcccttgtatggctttgcattattattgtcgtcattgcggagtgaaagtaggcagtctcgaatcttcaatggtatcgacagactcacttggatttcagcacttaacaaatgaggaaagaaacgatatgatttcttataaagaaaatggagatgtccatgttttgacgatatgtgaagactgccaagaggcgcttgaccgaaatccgcattaccacgaatatcacacatttattcaataaaaagctttggtgtagacactagaccaaagcgtttttctgttctcgcaggaaacagagaggaggggccatatggacaacattcaaacctttataaaagaaagcgatgactttaaatccatcatcaacggtttacacgagggcctgaaggaacagctgctcgcgggtctgtcgggttccgcgcgttctgtttttacttctgctctggctaatgaaacgaataagcctatctttctcatcacccataacttatatcaagcccagaaagtaacagatgatctgacttcacttctagaggatcggtctgtccttttgtaccccgtcaatgaactcatttcatcagaaatcgcagttgcaagccctgaattgcgggcgcagcgattagaagtcattaatagactaacgaatggagaagcgccaattgtcgttgctccggtagctgcaatcagaagaatgctgccgcctgttgaggtgtggaaaagcagccagatgctcattcaagtaggccatgatattgaacctgaccagcttgcctcacggctggtagaggtagggtatgagcggtctgatatggtttctgcgcccggggaattcagtattcgcgggggaatcattgacatttatccgttgacttcagagaatccggtgagaattgaactttttgacaccgaggtggattcaatccgcagctttaattcagatgatcagcggtcaattgagacccttacctcgatcaatatcggtcccgcgaaggaattaattatcagaccggaagaaaaagcgcgggcgatggagaaaatcgatagtggtcttgccgcgagcttgaaaaaattaaaggctgacaaacaaaaagaaatacttcatgcgaatatttctcacgataaagaacgcttgtctgaaggccagacagatcaggagctcgtgaagtatctctcatatttctatgaaaagcctgctagtttactagattatacacctgataatacacttctgattttggatgaagtcagtcggattcatgagatggaagaacagcttcaaaaagaagaagcggagtttataacaaatcttcttgaggaagggaagattttgcatgacattcgtttgtcattcagcttccaaaaaatagtggttgagcaaaaacggcctctgctgtactactctttatttttgcggcatgtacaccatacgagcccgcaaaatatcgtcaatgtgtcaggccggcaaatgcagagtttccatggccaaatgaacgtgcttgcgggcgaaatggagcgttttaaaaaatcaaatttcactgttgtgttcttaggagcaaacaaggaacgtacacagaaattgtcatctgttttggctgattatgatatcgaggctgccatgacagacagcaaaaaagcgcttgttcagggacaggtctatatcatggaaggcgagctccaatcgggatttgagctgccgttaatgaagcttgccgttattacggaagaagaactgttcaaaaaccgtgtaaagaagaagccgcgaaaacagaagcttaccaatgcagagcgcatcaaaagctattctgagcttcaaattggagattatgtcgttcatattaatcacgggatcggaaaatacctggggatcgaaactcttgaaatcaacggcattcataaagactatttaaatatacattatcagggcagtgacaagctttacgtccctgtagaacaaattgatcaggtccaaaaatatgttggctccgaaggaaaagagccaaagctgtataaattaggcggaagtgaatggaagcgggtcaagaaaaaagtagagacatccgttcaggatattgctgacgacttaattaagctgtatgccgaaagagaagcgagcaagggctatgcgttttctcctgaccatgagatgcagcgtgaattcgaatcggctttcccttatcaagagactgaggatcagctccgttcgattcacgaaatcaaaaaagacatggaaagagaacgtccgatggaccgcttgctgtgcggagatgtgggctacggtaaaacagaggttgccatacgtgccgcgtttaaggcgatcggtgacggaaagcaggtagctctgctcgttccgacaacaattttggcacagcagcactatgaaaccataaaagagcgcttccaggactatccgattaatatcggccttctcagcaggttcagaacgcgaaaagaagcaaacgaaacaatcaaagggctgaaaaacggaacggttgatatcgtcatcgggacgcatcggctgctatcaaaggatgtcgtgtataaagacttagggctcctcatcattgatgaagagcagcgtttcggtgtaacccataaagaaaagatcaagcaaataaaagccaatgttgatgtattaacgttaacagcaacaccgattccgcgtacgctgcatatgtctatgcttggcgtaagggacctttcagtcatcgagactccgccggaaaatcgcttccccgtacagacgtatgttgtggaatataacggcgctcttgtcagagaggcgattgaacgtgagcttgcacgcggaggccaggtctatttcttgtacaaccgggtagaggacattgagcggaaagcggatgaaatttcaatgctagtccctgacgcgaaggtagcatatgcgcatgggaaaatgacagaaaatgaattagaaaccgttatgctaagttttcttgaaggagaatcagacgttctcgtcagcacaaccattatcgaaactggcgtggacatcccgaacgtcaatacgctgatcgtatttgacgccgacaagatgggactttctcagctttaccagctgcgggggcgtgtcggccgttctaaccgtgtggcgtatgcgtacttcacgtatcgccgggataaagtgctgacagaagtggctgaaaaaaggctgcaggctattaaagaattcacagagctaggttccggttttaaaatcgcaatgcgtgacttaacgattcgcggagctgggaatcttcttggtgcccagcagcatggcttcatcgattcggtcggatttgacctctattcacaaatgctgaaggaggccattgaggagcgtaaaggagacacagcgaagacagagcagtttgaaacagaaattgatgtcgagcttgatgcgtatattccggaaacttatattcaagacggcaaacagaaaattgatatgtataaacgcttcaggtctgtggcgacaatcgaagagatgaatgagcttcaagatgaaatgatcgaccgctttggaaactatccaaaagaagtcgaatacttgtttactgttgcagaaatgaaagtctatgcgagacaggaacgtgtcgagctgattaagcaggataaagatgctgtcagattgacgatttctgaagaagcaagtgctgaaattgacgggcagaagctgtttgagcttggcaatcaatatggcagacaaatcggactgggaatggaagggaaaaaactcaaaatctccatacagacgaaaggccgtagtgctgatgaatggctcgacaccgtgctgggcatgctgaagggcttaaaagatgtgaaaaagcaaaccatttcatcaacgtaaattttgttactctctggtgtatattacatttgatgtgacggatactaatttcaagcgaggcggaaggtacataaagtaactgctttaggtctttcccacatgtatataccatcaaatgaaagagaggcaccagagatgaaagcaaccggtatcgtacgtcgtattgatgacttaggtcgggtcgtgattcctaaagaaattcgaagaactctgagaatcagggaaggcgatccgcttgagatttttgtagatcgtgacggagaagtgattttgaaaaagtactctccgatcagtgagcttggagactttgcaaaggagtatgcagacgcgctttacgacagcctcggccattcagtgctgatttgtgatcgtgatgtgtatattgccgtgtccggcagctccaaaaaagattacttaaacaagtcaatcagcgaaatgctggaaagaacaatggatcagcgcagctccgtgcttgagagtgatgcgaaatcagtacagcttgtgaatggaattgatgaggacatgaattcttatactgtcggcccaattgtggcgaacggtgatccgataggtgctgtggtgatcttttcaaaagatcagacaatgggcgaagtagagcataaagccgttgaaacagcagctggatttttggctcgtcaaatggaacagtaggtcttattcctttcttcgaaaataggtatgtaaagaacagctctccttgggacgctgttctttttcatgcgtgccgaaaaaggaatccaagggttgggatgtggtataataacctcgtttttatttgtgccgcggtaatacgtgaaccgtattgcccctgacgttgggaaggagcttttggatggacgattcaataggcgttaaacggcattggatttggcagggggcttttgttttaattctggcaggcatcatcacaaaaattttaagcgctgtttacagagtcccgtttcaaaacattgtcggcgatgttggattttatatatatcagcaggtatatccctttcttggtattgcggtcatgctgtccacatcaggatttccagtcattatttcaaagctgatgaatgattatagtgaaaaaaatcatcacaccatattaaaaatatcagcgttgtttttgtctttaatcggtattttattatttctttgtttatatctgggtgctgttcctattgcactctttatgggagattcgcatctagccgtgttaattcaagtggccgcatacgcgtttctgctgttcccatttgtcgcgttgcttagaggcggttttcaggggcggcacgaaatgctcccttcagccttatcacagatgacagagcagtttctgcgtgttgcggtgctcttgggtttatcattttggctcgtgaaaaagggagcctcgctttatactgcgggagcggcagccgcttcaggctctcttgccggaagtttggttgcattgataatactgggttttttttggttcaaaacgaaaagagacaaccaaacggataggcaaaacgaaaatgtcatcacaacaaaagaattgacgaaaaaactgcttttatattcggttacaatttgtgtaagcagtttgctgcttttgtttatccagctcgttgatgctttgaatttatatgcattgctttcgggtggtgaggcaagcgaagaagcaaaacgcttaaaggggatctatgatcggggacaacccttgctgcagctcggctcagtttttgccgtaagcattgcgacgtcactcgttccgtatatttctatggctgtaaaaaacaaagagctgaagatcatgaaagaaaaaatcacgtcatctttgaaactatgccttgtgctcggtacaggcgcatcggctgggttgatttgcattcttaagccggttaatatcatgctgtttcaaaatggagaagggacaggtgcgttacaagtatttagctgctccattttgtttgcatccttggcggtaacggcagcggcagtcttacagggagcggggtacacagtttttcctgcgatagcggtgggcgcgggtgttgcagtgaaatgggtgttaaacacacttttggttccgcgctatgggattgaaggcgcatcgcttgcgacagctgcttcctttgcggctgtcgccggccttaacttgtatcagcttcggcaaaaggaatggctcgataagcttagaggcgttttgattccgattattggatctgctcttttgatgtcagctgttttgcttgcgtatacgcgtctctggactttcttgtttcctgcaacaggaagaggagcggctgtgattgagagtctttctgctgttgccattggtggcgcggtgtttatttattgtatgatgagattgggaatatttacagatgaagagctgaacagtgtgccattcggcagcaagttaagcaaattcatgagaaggagagaacaaaatggcgggtaaaattacagtcgtcggacttggtgccggagacatggaccaattgacaattggtatacacaagctgctgacgaaggcagatacgctgtatgtcagaaccaaggatcatcctttaattgaggagcttgaaaaagaaacgaagaacatccgtttctttgatgatatatatgagaaacatgatcagttcgaggcggtatatgaagaaattgcagatatcctctttgaagcggcgcggcgtgaggacgtggtttacgctgtgccgggacacccttttgtcgcagaaaaaacagttcagctgctgacggagcggcaggaaaaggaaaacgttcaagtgaaagtcgcggggggacaaagtttccttgatgccacattcaatgccttgcaaattgacccgattgaaggttttcaatttgtggatgccggcacattgtccgcggatgagcttgagctcagacatcatctgatcatatgtcaggtttacgaccaaatgacggcttctgaagtcaagctgacattgatggagaagctgcctgatgattatgaggtcgtcattgtgactgcagcaggcagccgtggcgaggagatcaggacagtgccattatttgagctggaccgcaatgtcgctttgaacaacttaacaagtgtgtatattccgccgattaaagaagagaagctgctttatcacgaattctccacgttccgaagcatcatcagagagcttcgcggacctaatggatgtccgtgggataaaaagcagacgcatcagtcattaaagcagtacatgattgaagaatgttatgagcttctcgaagctattgacgaagaagacacagaccatatgatcgaagagcttggcgacgttttgcttcaggtcttgcttcacgcgcaaattggtgaagatgaaggttatttcacaattgatgatgtcataaaaggaatcagtgaaaaaatggtccgaagacatccccatgtgtttaaagatgttaaggttcaggatgaaaacgatgttttagccaattgggaagatataaaaaaggccgaaaaaaatacatctgaatcatcattactagacagcgtaccgaaaacccttccagctctttcgaaagcagctaaattgcagaaaaaagcagcgaaggtcggttttgactgggaagacgtcagcgatatttgggaaaaggtaagtgaggaaatgaaggaattttcttctgaggtttctgaagctcctcacgaacacaatcttaaagctgagtttggcgacattttgttcgcgctggtgaatgtagcccgcttctacaaaatagagccagaggaagcgctgaccatgactaatgacaaattccggagacggttctcgtacattgaggaaacagcgaaggaagagggagtcgagttggctgatatgtcccttgaggacatggacaaactgtggaatgaagcaaaagaaactgagaggagatcatagatatgagattagataaatttttgaaagtatcacggctgatcaaacggcgtacactagcgaaggaagtagctgaccaaggacgaatctctattaacggaaaccaagctaaagctagctctgacgtaaaaccgggagatgaactaacggtccgcttcggccaaaagcttgtaacggttcaagttaatgaattgaaagacacgacgaaaaaagaagaagctgcaaacatgtacacgattctaaaagaagaaaaactcggcgaataggcttgttctaaaaaaatcccccacctcatacaatgcagtaataatgctaaaagtatcgaggatatgggggctgaatagatgaattcatattatgatcaaaaaggttcttcgtctgttccggaacagcatgatgtgacaatgaaaggccggaagcatttagatatttctggggttaagcatgtggagagttttgataacgaagaattcctgctggaaacggtgatgggaatgctctccgtcagaggccaaaacctgcagatgaaaaatcttgatgtggaaaaagggattgtttcgattaaaggcagggtatttgatttagtgtacttagacgaacaacaaggggataaagctaaagggttttttagcaagttgtttaaatgacgctgacgacacaattctatacaatgctagcgatgtccggtatgggtctctggcttggtgcttcgcttgatacataccggctctttgtcattcgtgccaaaacagccagatggctattatttattcatgatattcttttctggattgtgcaagggctgcttttcttttatgtcttgcttcatgtaaatgagggagaattcaggatttacatctttttagcggttctgctgggcgttgcgacgtatcagagcctttgcaaacgaatctatataaaaatactgaaattcgtcatttaccttgttgcttctgtttatcaattcttcaaaaaactcattcagcacgtgttatttcgtcctattgtgtggacatgcggagcgatcatctggctggcggcatttttattcaagaaaacatacagcctgataggttttctcctgctgtgtctatataaaatagtcatggttctgtgttttccgatccgttttatcgcgaaacaatgtttgaaacttcttcctgtgaaaatgcgtctaacttttagacgttattttgaaaaaggtgcaggatttctcaaaaagaagaagaaactattgataaccataagaacgaccattacacggtttttgaagaaatgaaaggaggaccgtctggtttgaatttttccagggaacgaacgataactgaaatacaaaacgactataaagaacaagtagaacggcaaaatcagctgaagaaacgaagacgcaaagggctgtacagacggttaactgtattcggcgccctagtattcctgacggcaattgtgctggcaagctctgtatggtcccaaacatcttcccttagtgcaaaagaagaaaagaaagaacagcttgaaaaagaactgaaaagtttaaagacaaaacaaacggatttaaaagaagaaatatccaaattgaaggatgaggattacgtcacagagcttgccagaagggacttattcatgtctggagacggagaaattatcttcaatgtggagaagaagagcaagtagccttgttgacacttaaatttttatttaggtataattaagcaaacgatctttttataagcctaaggaggagcactttttttatgtcgattgaagttggcagcaagttgcaagggaaaattacaggtattacaaattttggagcatttgttgaattgcctggaggctcaaccggtctcgttcacattagtgaggtagctgataattatgtcaaagacattaacgaccacttaaaagtcggcgaccaagttgaagtgaaagtcatcaacgttgaaaaagacgggaaaattggtttatctattaaaaaagctaaagaccgtccgcaagccagacctagaaatgatttccgtccgaaagaatcttttgaacagaaaatgaataagtttttaaaagacagcgaagatcgcttgtcatctttaaaacgcaatacggaatcaaaacgtggagggcgcggagcaagaagaggataacttgctgctttctataaaataaatgaagcatccgttcatcccgacggatgcttttttattatcctcatcctctttaagagtcagaaaattacaacattaaagtttctgttgacgaaagagacaaacctttgtattatataacttgtgcttagaagcacaaaacaatatggcggtgtagctcagctggctagagcgtacggttcatacccgtgaggtcgggggttcgatcccctccgccgctaccatatttgtttggcccgttggtcaagcggttaagacaccgccctttcacggcggtaacacgggttcgaatcccgtacgggtcatcctaaaaaatcggtttctcttgcagaagccgatttttttcatttttagacaacattccggaaattcttttcataaacgaatatcaaggcagaaaccgtcgaagatttctttggtattgttaccttcttttgacaaaatcctatctgtgctttcgctataatgacaggcaacgaatataacaggtgggagatgagaggaatggaaaaagcagaaagaagagtgaacgggccaatggcgggacaagctttggaaaaactccaatcgttttttaacaggggcacgaagctggtgactcatcatttgcattcactgtttttctataaaggattcatttatgttgttatcggatttttgcttggacgggctttcatattatccgaggtgcttcctttcgcacttcctttctttggagcgatgcttctcatcagaagagacaaagcgttttatgcggttttggctgtgcttgcaggtgcgctgaccatatctccaaagcactcattgctcatactggcggcattgctggcattcttcgtattttctaaagtggctgccttcattaccgacgatcgtgttaaagcactcccgattgtcgtgttcttctcgatggctgcagcaagagccgggtttgtttatgcccaaaatggcgtatttacaacctatgattatgtaatggctatcgttgaggctggactgtcgtttatcttaacactgattttccttcagagccttccgatttttactgtgaaaaaagtgaaacaatcattaaaaatagaggaaattatctgctttatgattcttattgcctctgttttaacggggctggctggcttgtcctaccaagggatgcaggcagaacatatattggctcgttatgttgtgttgagtttttcctttattggcggagcaagcatcggctgtacggttggtgttgtgaccggcctgattcttggcttggcgaatatcggaaacctatatcaaatgagtctgcttgctttttccggtttattgggcggtttgctgaaggaaggaaaaaaagcgggtgcagcaatcggtctgatcgttggttcacttcttatatctttatatggtgaaggctctgccggtctgatgacaacgctctatgagtcattaatcgcagtcggcctgtttttgctcacacctcaatctattacaaggaaagtggcgagatatattccgggaactgtcgagcatcttcaagagcaacagcaatacgctagaaaaatccgtgatgtcactgctcagaaggtagaccagttctccaatgtatttcacgcgctgtctgaaagctttgcaaccttttaccaagcgtcagacgaacagacagatgacagcgaagttgatctgttcttaagcaaaatcacggagcattcctgtcagacgtgctacaagaaaaacaggtgctgggtacagaactttgataaaacatatgatttaatgaaacaagttatgcttgaaacagaggaaaaagaatatgcatcaaaccgaaggctaaaaaaagagtttcaacagcattgttctaaatccaagcaggttgaagagctgattgaggatgagctcgcacatcatcatgcccatttgacactcaagaaaaaagtccaagacagcaggcgccttgttgctgaacagcttttaggtgtttctgaggttatggccgacttttctcgggaaataaaaagagagcgagaacagcactttctgcaggaagagcaaatcatagaagcgcttcagcatttcggaattgagattcagcatgtcgagatctatagccttgaacaaggaaatatcgatattgaaatgaccattccgttcagcggacatggagaaagtgaaaaaatcattgcccctatgctgtctgacattctggaagaacaaattcttgtgaaagctgaacagcactctccgcatccgaatggatacagccatgtcgcctttggatcaacaaaatcatacagggtgtccacgggagctgctcacgctgcgaagggcggcggccttgtctccggcgacagctacagcatgatggagcttggagccagaaaatatgctgcagcaatcagtgacggaatgggcaatggcgcaagagcgcactttgaaagcaatgaaacgatcaagcttcttgaaaaaatccttgaatcgggaattgatgaaaaaatagcaattaaaacgatcaacagcatactgtctctaaggacaactgacgaaatatattccacgcttgacctatctattatcgatcttcaagatgccagctgtaaatttttgaaggttggatcgacgcctagctttatcaaacggggtgaccaggtcatgaaagttcaagcgagcaatctgccaatcggtattattaatgaatttgatgtggaggttgtgagtgaacagctgaaagctggtgacctcttaattatgatgagtgatggcatttttgaggggcctaagcatgtggaaaatcacgacttatggatgaagcgtaaaatgaaagggttgaaaacaaatgacccgcaggagattgcagatttgcttatggaagaagtcatccgcacaagatccggccaaattgaggacgatatgactgttgttgttgtccggattgatcacaatacaccgaagtgggcatccattcctgttccggcaatctttcaaaacaaacaagaaatttcataacgcttccgtataaatcaaatttcttctggcgaagatgggaatatatgaatctgagaatcctcgtattctccaggaggaatgaatgtgaacaacggacatttaaatcaaattttgctgataacggatggctgctcaaaccatggggaagacccgcttgcaatggctgcttttgctaaagagcaggggattacggtaaatgtcattggtataatggaagaaaatcaaattgaccctgaggcaatgaaggaagtcgaagggattgcacttgccggaggaggtgtgcaccaagtcgtttatgcatctcagctttcacaaactgttcaaatggtaacaaagaaagcgatgacgcaaaccttacaaggtgtagtcaatcaagaactgaaacagattctcggaaagaatgtggaaatggaagagctttctccggaaaaacgcggcgaagtcatggaagtggtagacgagcttggagaaacggtgcatcttcaggttttggttcttgttgatacaagtgcaagtatggcgccaaagcttccaacagtaaaagaggcgctgattgatttgtctgtaagcctcaattcccgaatcgggaataacgaatttgcgatgtgtatatttcccgggaaaaaacaagaggtcgagcttgtgctgaactggacaccgaagctgcaatctctttccacactctttgcaaagctttcgacaggcggcatcacgccgacaggtccggcgattcgtgaagcgacactgcagtttgaaaaaatacgctcaagaaggggcatgctggcagatgatgaacgacgctttgacgagtttggcatgtagcctcaagccgggtacgacaatcaaaggcaagtggaatggaaacacttatacattgcgtaaacagcttggtaaaggggccaatggaattgtgtatttggcagaagcatcagatggacatgttgccttaaaggtgagtgatgacagcctgtctattacttctgaagtgaatgtcttgaaatctttctcaaaggcccagtccgttacgatggggccttctttttttgatacggatgatgcctatattcccagtaccaatacgaaagtttcattttatgcaatggaatacataaaagggccgctgcttttgaagtatgtcagtgataaaggagcagagtggatacctgtattaatgattcagctgttatccagcttatcggtgcttcaccagcaaggatggatattcggcgatcttaaacctgataatctgatcgtaactggtccgcccgcaaggatccgctgcattgatgtgggcggcacgacaaaggaaggccgggcgataaaagagtatacggagttttatgacagaggctattgggggtatggaacaagaaaggcagagccatcctatgatctgttcgcagttgccatgattatgatcaacagtgtgcataaaaaagaatttaagaaaacgaaccagcccaaagaacagcttaggtctctcatcgaaggaaaccctctgcttcaaaagtataaaaaagtgcttttttcaaccttgaacggagattatcaatccgcagatgaaatgaaaaaggatatgctagacgcggggcaaaaagcagcacaaagaaaacagcctataaaagcatcaccgcagcctgccacacgacatagacagcaaaaaccgcgccaaggaaaaataacgaagacgcgatataccccaaaacagaaaccggctaagtcgggggggttatttgaaacaacgctgatcgtgatcagtgttttagcgctttatttcgcctatattatctttttcttaatctgaatggtgcaaactgcagagcctatgcttcttctttgcttggaggggttgaaagtgttaggatatgaatatctttaaaatacctgctcattgtgaggaggacattgtgaaaagtgtcaaagattttttaaacaaacacaatcttacgttaaaaggggcgacgatcattgtaggcgtttctggcggtccggactcaatggctcttcttcacgcgttgcatacgttatgcggccgttcagcgaatgttattgcagctcacgttgaccatcggttcagaggtgcggaatccgaggaggacatgcgttttgtccaagcttattgtaaagctgaacagctcgtgtgcgaaacggctcaaatcaatgtaaccgcatatgcacaggaaaaaggactcaataagcaggctgcagcacgcgattgccgctaccagttttttgaggaaatcatgtcgaagcaccaagcggactatctggctcttgcgcatcatggtgatgaccaggttgaaacaatgcttatgaaactggctaagggtacgcttggaacgggacttgcgggaatgcagccggttagacgttttgggacggggcggatcatcaggccgttcttaaccattacaaaggaagagatccttcactattgccgtgaaaacggcttgagctaccggacggatgaaagcaacgccaaagatgactacacaagaaacagattcagaagaacagtgctcccgtttttgaagcaggaatctccggatgtgcataaaaggtttcagaaagtgagtgaagcactgacggaagatgagcaattcttacagtcattaacgaaagatgaaatgaataaagtaatcacaagccagtctaatacatcagttgaaatcaattcctctcaattgcttgccctcccgatgcctttacaaagaagaggagttcaactaatattaaactatctttatgaaaacgttccatcatccttttcagcccatcacattcagcagtttctcgattgggcggaaaatggcagtccttcaggagtactggactttccgaaaggactgaaggtggtcaaatcatatcagacatgtttgtttacatttgaacaatggcagtgcaaaaatgttccctttgaataccaaattagcggagcttctgatgaaacggcagtgctccctaatggatatctgatagaggcaaggcattatgcggactcgcctgaagaacatgggaatgctgtttttatcacaagtgaaaaaaaggtgcgatttcccttaacaatccggacgagaaaagctggagaccggatcaaactaaaagggatgaacggctcaaaaaaggtaaaggatatatttattgataagaaactgcctctccaagaaagagacaactggccgattgtgacggacgcaagcggtgaaattatctggatacctggcttgaaaaaatcaatttttgaagatcttgtgattccaaacagcgaccgcattgtattacaatatagacagcatgaaaagtgtagggggcaagcaaaatcatgatgaaacatgatatcgagaaagtactgatctcagaggaagagatacaaaagaaagtaaaagagttaggtgcagaattaacgagcgagtatcaagatacatttccgttggcaatcggtgtgttaaaaggagcacttccttttatggcggatcttatcaagcatattgatacatatttggaaatggatttcatggatgtatcaagctacggaaattctacggtttcttctggagaagtaaaaatcattaaagatttggatacatctgtagagggccgggacatcttaattattgaagatatcatcgacagtgggttaaccttaagttatctcgtagagctcttccgataccgtaaagcaaaatcaattaagattgttacccttttggataaaccgagcggaagaaaagcggacatcaaagcagactttgtcggttttgaagttcctgacgcgtttgtagtgggttacggacttgattatgctgagcgctatcgcaatctgccttatatcggagtgttaaaaccggcagtttatgaaagctgatcggcagcctgcttccgagatggttattgtttgtattggaatgattttctatggtactattgaacatagttgtgcttactgtgggaggaggtaaggaatgaatcgggtcttccgtaataccattttttatttacttattttattagtagtaatcggggttgtgagctacttccagacctcaaatccgaaaacagaaaatatgtcgtacagtacgttcatcaaaaacctggatgacgggaaagttgatagcgtatcggttcagcctgtcagaggtgtttatgaggtaaaagggcagctgaaaaactacgacaaagatcaatactttttgactcatgttcctgaaggaaagggagcagaccagatatttaacgctttgaaaaagacagacgtaaaggttgagcccgcgcaagaaacaagcggatgggtgacgttcctgacgaccatcatcccatttgtcattatctttattctgtttttcttcctgctcaatcaggctcaaggcggcggcagccgtgtcatgaactttggcaagagtaaagcgaagctgtatacagaggaaaagaaacgcgtcaaatttaaagacgttgcaggggcagacgaagaaaagcaagaacttgttgaagttgttgagtttctgaaagatccccgcaagtttgccgagctcggcgccagaataccgaaaggcgtgcttttagtcgggcctccgggtaccggtaaaacattgcttgccaaggcttgtgcgggagaagccggcgtacctttcttcagcatcagcggatctgatttcgttgaaatgtttgtaggggtcggtgcttcccgtgtgcgtgacttgtttgaaaatgcgaaaaagaatgcgccttgtttgatcttcattgatgaaattgacgcagtcggacgccagcgtggcgctggtctcggcggtggacacgatgaacgtgaacagacgctaaaccaattgcttgttgaaatggacggattcagcgctaatgaaggaattatcatcattgctgcgacgaaccgtgcggacatcttggacccagccttacttcgtccgggacgttttgaccgtcaaatcacagtggaccgcccagatgtcattggccgtgaagctgtattgaaagtccatgcgagaaacaaaccgctggatgaaacggttaacctaaaatcaattgccatgagaacaccaggcttctcgggcgctgacttagaaaacctcttgaatgaagctgcgcttgtagcagctcgtcaaaacaagaaaaaaatcgatgcgcgtgatattgacgaagcgacggaccgtgtaattgccggacccgctaagaagagccgcgttatctccaagaaagaacgcaatatcgtggcttatcacgaaggcggacacaccgttatcggtctcgttttagatgaggcagatatggttcataaagtaacgattgttcctcggggccaggctggcggttatgctgttatgctcccaagagaagaccgttatttccaaacaaagccggagctgcttgataaaattgtcggcctcttgggcggacgtgttgctgaagagattatcttcggtgaagtcagcacaggggcgcacaatgacttccagcgtgcgacgaatattgcaagacgaatggttacggaattcggtatgtcagaaaaactgggaccgttgcaatttggacagtctcagggcggtcaggtattcttaggccgtgatttcaacaacgaacagaactacagtgatcaaatcgcttacgaaattgatcaggaaattcagcgcatcatcaaagaatgttatgagcgtgcgaaacaaatcctgactgaaaatcgtgacaagcttgaattgattgcccaaacgcttctgaaagttgaaacacttgacgctgaacaaatcaaacaccttgtcgatcatggaacattacctgagcgtaatttctcagaagatgaaaagaacgatgatgtgaaagtaaacattctgacaaaaacagaagaaaagaaagacgatacgaaagagtaattcgctttctttctaaataaactgccggctgacgctggcagtttttttatgtaaatgatgggctcagctgcggcttttacaatcatccaaatctggtatcgatttgtttacaaatgagccgctgatcgtgtatggtattgtagaatgtttgtaaaagtaaagtagagaaactattcaaaagtggtgatagaggttgttactggttatcgatgtggggaacaccaatactgtacttggtgtatatcatgatggaaaattagaatatcactggcgtatagaaacaagcaggcataaaacagaagatgagtttgggatgattttgcgctccttatttgatcactccgggcttatgtttgaacagatagatggcattattatttcgtcagtagtgccgccaatcatgtttgcgttagaaagaatgtgcacaaaatactttcatatcgagccgcaaattgttggtccaggtatgaaaaccggtttaaatataaaatatgacaatccgaaagaagtgggggcagacagaatcgtaaatgctgtcgctgcgatacacttatacggcaatccattaattgttgtcgatttcggaaccgccacaacgtactgctatattgatgaaaacaaacaatacatgggcggggcgattgcccctgggattacaatttcgacagaggcgctttactcgcgtgcagcaaagcttccgcgtatcgaaatcacccggcccgacaatattatcggaaaaaacactgttagcgcgatgcaatctgggattttatttggctatgtcggccaagtggaaggaatcgttaagcgaatgaaatggcaggcaaaacaggaaccaaaggtcattgcgacaggaggcctggcgccgctcattgcgaacgaatcagattgtatagacatcgttgatccattcttaaccctaaaagggctggaattgatttatgaaagaaaccgcgtaggaagtgtataggaggtttagtaatggattatttagtaaaagcacttgcgtatgacggaaaagttcgggcttatgcggcgagaacgactgatatggtaaatgaggggcagagacgccatggtacgtggccgacagcatccgctgcattgggccgcacaatgacagcttcacttatgctcggcgctatgctgaagggcgatgataagctgaccgtgaaaatcgagggcggaggtccaatcggagctattgtagctgatgccaatgccaaaggagaagtcagagcctatgtctctaacccgcaagttcattttgatttaaatgaacaaggaaagcttgatgtcagacgtgcggttggaacaaacggaacgttaagtgtcgtaaaagatttaggtttgcgcgagttcttcacaggacaagtagaaatcgtttcaggagaattaggagatgatttcacttactatcttgtatcatctgagcaggttccttcatcagtgggcgtaggtgtgctcgtgaatcctgacaataccattcttgcggcagggggctttattattcagctgatgccgggaacagatgatgaaacaatcacaaaaattgaacagcgtctatctcaagtagagccgatttctaagctcatccaaaaagggctgacaccagaagaaattttagaagaagtcctaggcgagaaacctgagattttggaaacgatgcctgtcagattccattgcccttgttcaaaagaacggttcgaaacagccattttaggactaggcaaaaaagaaattcaagatatgatagaagaagatggacaagccgaagcagtatgccatttttgtaatgaaaagtacttatttacaaaagaagagctggaagagcttcgtgaccaaactacccgctaagctctttagcgggtttttaatttgagaaaaggggctgaaagcaggtttgaaatcaagaacaatctggaccattattttaggggcgctgttggtttgctgtattgctgttgcatatacgctgacgaaatcccaagctggcgcatcgtcatccggtgagtctattgcgactatcggaggcaagagtgtgacaagagaagaatggctgaaagaaatggaagatcagtatggtaagtcaacgcttgaagatatgatcaatgtccgagttgttgagcagctggctaaaaagaacaaccttaaaatatccaaaagcgaagttgatcgtgagtttttgctgattaaagcggtcaataattccttttacgaagatgaacatacgacggagaaagagtggaaagaccaaattcgttataatatcctccttgaggaattgttaacaagggatatcgatatctcaaacaaagaattggaatcattctataataaaaataaggaactatatcagtttgatgattcgtatcgaattcggcacattgttgtaaaagatgaagaagaagcgagagaagtcctgaaagaactgaaaggcggatcaagctttgaagctgtcgctgccgaaagatctacagacagatatacatcaccatacggcggagatttaggttttgtcacagaggcatcagacaacattccatcagcatacattgaagaggcgaaaacactcaaagaggatgaatggtctcaggaaccaataaaggtcagcaacggatatgccattatccaactgaaagaaaaactaaaggcaagaacgttctcatttgatgaagtaaagggccagatcagacggcaaatcgcaatggatcagctaggtgataaagcgacagttaagacactttggaaagaagctgatgtatcttggttttatggggaaaaaagtactaagtgattgacaaaaaattttgaaattgatagattatatacataataccaatacaaatagtcggaaattgaggtgtcgagaatggtacgtgtagcaaactccattactgaattaattgggaatacgccaatcgttaaattaaatcgccttgcagatgaaaacagtgcggatgtatatctaaaacttgaatacatgaaccctggaagcagtgtaaaagaccgtatcggtttagccatgattgaagcggctgaaaaagaaggaaaattaaaagccggtgatacaatcattgaaccgacaagcggaaatactggaatcgggcttgcaatggttgctgctgctaaaggattaaaagccattttggttatgcctgatacaatgagcatggagcgccgcaaccttcttcgcgcatacggtgctgagcttgtgctgactcctggtgcggaaggcatgaaaggtgccattaagaaagctgaagagcttgctgaaaagcacggatactttgtgccgcagcagtttaacaacccttctaaccccgaaattcaccgccaaacaacgggtaaagaaatcgttgagcaattcggtgatgaccagcttgacgcatttgtagccggaatcggaacgggcggaacgattacgggagcgggcgaagtgctgaaggaagcatacccttccatcaagatttatgctgttgaaccgtcagattccccagtgctttcaggaggaaaaccaggcccccacaaaattcagggaatcggagcgggattcgtgccggacatcttaaacactgaagtatatgatgaaatcttccctgtgaagaatgaagaagcattcgaatatgcccgcagagctgcacgtgaagaaggaattctcggaggcatctcatcaggtgcggcaatttatgctgctcttcaagtagcaaaaaaactcggaaaaggcaaaaaagtattggccatcattccaagtaacggcgaacgttatctaagcacgccgctgtatcaattcgattaaaaaaagccaaaactcccggtccgccgggagtttttttatatttcgtgcatcaaatatgccatgtctgcgacgaatgttattcttggaagagaaattcacttttttcactaacaacattgctttacaattaaaaacaagtaaaaaagaaaatagaggaatgatacaaatggcacaacgcagaccggcaggcaaaaaaataccttttcaaaaagactcattcttacaacaatttgagaaacttgcgcaatcccggaaacatcatgtacttctcgaaagtgcaagaggcggcagatacagtatagccggtcttgatccaattgcgactgtgaaaggaaaagacggaataactacaattaagcatggtgatgagatgctgtttaaagaaggtgatccattacgggccttccacagctggtttaaaacgctggaaacagaaacaaatcatgagttccctgactttcaaggcggggcaatcgggtttctcagctatgattacgcacggtacattgaaaattttaaaatgctctcattagatgatctagaaacaccagatatttattttcttgtttttgatgatatagcagtttatgaccatcaagaagagtctctatggctgattactcatgttaatggttctgatcaggaaacagcgaatgtgaagctatctgagttagagcagatgtggctgactgagcttcccgctgtctcttcgcgagagatgaaccctgaaacagatggttctttcgcggcgccatttaccgaggatgggttctcgcaagctgtagagaaaatcaaacaatacattgccagcggagatgtgtttcaagtcaatctatcaataaggcagtcacagtcactgtctgcccacccatatcaaatttacaaaaccttgagagaagtaaatccttctccttatatggcgtatttagaaacacctgatttccaaatcatttgcggctcgcctgaactgcttgtcagcaaaaagggcaagctattagagacgagaccgattgcgggcacccgttccagagggaaaacaaatgaagaagacgaggtgcttgcaaacgaattgatacacaatgaaaaagaacgcgcggaacatgtcatgctggttgatcttgagcgaaatgatctgggaagagtatcacggtacgggtctgtgcgcgtaaatgaattcatggcaattgaaaaatactcgcatgtgatgcacattgtgtctaatgtccaaggtgaactgcaggatgggtatgatgctgtagatattattcatgctgtattccccggaggaaccattactggtgcaccgaaagtaagaacgatggaaattatagaagaacttgagccgacacgccgagggctttatactggatctataggatggtttggatataatcacgatctgcagtttaatatcgtcattcgaaccatttatgcaaccggagggcaggcatttatgcagtccggcgcaggagttgtgattgattctgttccgaagcacgaatacaaggaatcattcaaaaaagcttttgcgatgcaaagagcattagagctgagcaaagaagagacaaaaattagatgaggtgagcggagaaatgattttaatgattgataactacgattcattcacgtacaacttggtacagtatttgggcgagcttggggaagagctggttgtgaaacgcaatgacagcatcacaatcgaagaaattgaagaactgtctccggactttctgatgatatctcccggaccgtgcagccctgatgaggcgggaatcagcctcgaagcgattaaacatttcgcagggaaaattcctattttcggtgtatgtctcggacaccagtccatcgcacaagtgttcggtggtgacgttgttagggcagaacggcttatgcacgggaaaacctcggatatcgagcatgacggcaagaccatttttgaagggttgaaaaacccccttgttgcgacgcgataccactcgctgatcgtaaaacctgagacgctgccaagctgttttacagtaacagcacaaacgaaagaaggagaaatcatggctattcgccacaatgacctcccgatagagggcgtgcaatttcacccagagtctattatgacctcctttgggaaagaaatgctcagaaattttattgaaacatatcgcaaggaagttattgcgtgatgatatatgtgaacggccggtatatggaggagaaagatgcagttctttctccttttgaccatgggtttttatatgggatcggtgttttcgaaaccttcaggctctacgaaggctgtccgtttttgcttgattggcatatagaaaggcttgaacgcgcgcttaaggatctgcaaatcgaatatactgtttcaaagcatgagatccttgagatgctggacaagctgcttaagctaaatgatatcaaggatggcaatgcccgcgtcagactgaacatatcagcggggatcagcgataaaggctttgtcgcccagacgtatgataagccgaccgttttatgctttgtgaatcagctgaaaccagaaagccttcctttgcaaaaagaagggaaggttttatcgatacggagaaacactcctgagggatcgttccggttaaaatctcatcattatctaaataatatgtatgcgaaacgggaaattggaaatgatccacgtgtcgagggaattttcctaacggaggatggagctgttgcagagggtatcatatctaatgtcttctggagaaaaggtcgctgtatctatacgccatcgcttgatactggtattctggacggcgtcacgagacgttttatcatagaaaatgcaaagaatatcggcctggagctcaaaacgggccgatatgagccagaagctctcttgacagctgacgaagcgtggatgacgaactcggttcttgaaatcatcccgtttactaaaatagaagaagtaaactatggaagccaaagcggagaagcaacctccgctcttcaattgttatacaaaaaagaaataaagaacatgattcatgaaaagggaggaagagcatggcgcagcacacaatagatcaaacacaagtaatccacactaagcccagcgctttatcatataaagagaagacgctggtgatgggaattttaaacgtaacgcctgactctttctcggacggcggaaaatatgacagcttagacaaggcgctgctgcacgcggaagagatgatcaatgatggtgcccatatcattgatatcggaggggaatcgacaaggcctggcgctgagtgcgtatctgaggatgaggagatgtccagagtcattccggtgattgagcggattacgaaagagcttggtgttcctatttctgtagatacgtacaaggcttctgtcgcagatgaagcagtgaaagccggcgcatccattatcaatgatatttggggtgctaaacatgatccgaagatggcttccgttgcagctgaacataatgttccaattgttctcatgcataaccgccctgaaagaaactacaatgacttattgccggatatgctgtcggacttaatggagagtgtaaaaattgctgttgatgccggagtagacgagaagaacattattcttgatcccggtatcggtttcgcgaaaacctatcacgataacttggcagtgatgaacaaactagagattttcagcgggctggggtatccggttcttctggcaacctcccgaaaaagattcatcggacgtgttctggatcttccgcctgaggagcgggctgagggcacaggcgcgactgtgtgtctcggcattcaaaaaggctgtgacattgtcagggtccatgatgtaaagcaaattgccagaatggcgaaaatgatggacgcgatgctgaataagggaggggtgcaccatggataaagtttatgtagaaggtatggagttttacggatatcacggtgtgttcaaagaagaaaacaaacttggccagcggtttaaagtcgatttaaccgctgagctggatttaagcaaagctggacaaacagacgaccttgagcaaacgatcaactatgctgagctctatcacgtatgtaaagatatcgtggaaggggagcctgtaaaattggtagaaacgctggcggaacgtattgctggcactgttctcgaaaaatttcagcctgttcagcaatgtacggtgaaagtgattaagccagacccgccaattcccggacactataaatcagtagcaattgaaattacgagaaaaaagtcatgaacaacatagcttatattgcacttggatctaatattggagatagagaaacgtatttaaggcaagcagtggcttcactgcatcagcatgctgcggtgacagtcactaaagtgtcgtctatttacgaaactgacccggtcggatacgaagatcaagctcaatttttgaatatggctgttgaaatcaagacatcattgaacccttttgaactccttgaactgacgcagcagatagaaaatgaattaggcagaacaagggaagtaagatgggggccgcggacggcagaccttgacattttgttatttaatcgtgaaaatattgaaacagagcaactaattgttccgcatccgagaatgtatgagcgtttgtttgtccttgcgccgcttgcggaaatttgccagcaggttgaaaaagaggctacaagcgccgaaacagaccaagaaggtgtaagagtatggaagcagaaatctggggtagacgaattcgtgcattcagaaagctgaaaggttatactcaagaaggatttgcaaaagcattaggtatatcagtttctattctcggcgaaattgaacgcggaaaccgattgccgtcagctgccataattcaagatgcagcagatgttttaaatataagtgcggacgaattggcgccgccagaaaaatagaacaaatgaaaggaggagaaaaattgttcaaaatcggagatattcaattgaaaaaccgggttgtgctcgcacctatggctggtgtctgcaactctgcgttcagattgactgtaaaggaattcggagccggattggtatgcgctgaaatggtcagtgacaaagcgatcctttacaacaatgcaagaacaatgggtatgctttatatcgatgaacgtgagaaaccactcagccttcaaattttcggaggaaaaaaggaaacccttgtggaagcggcgaagtttgtagaccaaaacacaactgctgatatcattgacattaacatgggatgtcccgtgccgaagattacaaaatgcgatgcgggagccaaatggcttctcgatcctgataagatttacgaaatggtttctgcagtagtggatgctgttaataaaccagttacagtgaaaatgagaatgggctgggatgaagaccacattttcgcagtgaaaaatgcacaggctgtagaacgtgcgggtggtaaagcagttgcgcttcacggccgtacgagagtgcagatgtacgaaggaacggcaaactgggatatcatcaaagaagtaaaacaatcagtatcgattccggttatcggaaacggcgatgttaagacaccgcaggatgctaagcgtatgctcgatgagacaggagtagacggggtcatgatcggacgcgctgcattgggcaacccgtggatgatttaccgtacggttcagtatcttgaaacaggtgaattaaaagaagagccgcaagtacgcgaaaaaatggccgtatgcaaactgcatcttgaccgcctgattgacttaaaaggtgaaaacgtagcggtaagagaaatgagaaagcacgctgcatggtatctgaaaggcgtgaaaggcaatgcgaacgttcgtaatgaaatcaatcattgcgagacgagagaagagtttgtacagcttttagatgcatttacggttgaagttgaggcaaaagagcttcaaaatgcaaaagtaggataatactcacctctatttgctgctcactgctagttttacgctggcagtttttctgcttttttcatgaaacaatatctgtaatggagtgataacaatgagtcaagaagagcataaccatgaagaattgaatgatcagctgcaagtcagacgcgataaaatgaatcagctgagagataacggcatcgatccattcggcgcacgttttgaaagaactcatcagtctcaagaagttatttcggcatatcaagatctaaccaaagaagagttggaagaaaaagcgattgaagttacaatcgcaggccgcatgatgacaaaacgcggcaaaggaaaagccggctttgcccatcttcaggatttagaaggccaaatccaaatctacgtaagaaaagacagtgtcggtgacgaccaatatgaaatcttcaagtcttctgacctcggtgatcttatcggcgtaaccggaaaagtcttcaaaacaaatgtaggcgaattgtctgttaaagcaacttcctttgaattgctgacaaaagcgcttcgtccgcttcctgacaaataccatggtttaaaagacgttgagcagcgctaccgtcagcgctacctggatcttatcgtaaacccagacagcaaacatacgtttattacacgaagcaagatcattcaagctatgagaagataccttgatgatcatggatacttagaagtagaaacacctacaatgcacagcattcctgggggagcttctgcacgtccgtttatcactcaccacaacgcgttagacattccactctatatgcgtattgctatcgaactgcacctaaaacgtctaattgtcggcggtttagaaaaagtatatgaaatcggccgtgttttccgtaacgaaggtgtctctacacgccataaccctgaatttacaatgattgagttatatgaagcatatgcggactataaagatatcatgagcttaactgaaaaccttgtcgctcatatcgcccaagaagtgcttggcacaactacgattcaatacggggaagagcaaatcgaccttaaaccggagtggaaaagaatccatatggttgacgcagtcaaagaagcgaccggcgttgatttctgggaagaggttactgttgaacaggcgcgtgaatatgcaaaagaacatggagtagaaattaaagactctatgacagtaggccatatcatcaacgaattcttcgaacaaaaaattgaagaaacgcttattcagccaacgtttatttacgggcatcctgtagaaatttctcctcttgctaagaaaaaccctgaggacccgcgttttacagaccgttttgagctgtttatcgttggccgtgaacatgccaacgcgtttacagagctgaatgatcctattgatcaaagagaacgctttgaagcgcaattaaaagagcgtgaagccggtaatgatgaagctcatctaatggatgaagactttgttgaagctctggaatacggtatgccgccaacaggaggtttaggcatcggtatcgaccgtctggttatgctgctgacgaatgccccttctattcgcgatgtgctgttattcccgcaaatgagacaacgctaataaagaagagcggtatcctccatagagaaaggatgccgctctttttaaattccttagtatttcttcaaaaaaactattgcactattatttactaggtggtatattattattcgttgccgctaaacaaggcgataacgaaaaaataacttaaaaaaagttattgacttcactgagtcaacgagttataataataaagtcgcttgaacgaagtgaacaaaatgatctttgaaaactaaacaagacaaaacgtacctgttaattcagtttttaaaaatcgcacagcgatgtgcgtagtcagtcaaactactttatcggagagtttgatcctggctcaggacgaacgctggcggcgtgcctaatacatgcaagtcgagcggacagatgggagcttgctccctgatgttagcggcggacgggtgagtaacacgtgggtaacctgcctgtaagactgggataactccgggaaaccggggctaataccggatggttgtttgaaccgcatggttcaaacataaaaggtggcttcggctaccacttacagatggacccgcggcgcattagctagttggtgaggtaacggctcaccaaggcgacgatgcgtagccgacctgagagggtgatcggccacactgggactgagacacggcccagactcctacgggaggcagcagtagggaatcttccgcaatggacgaaagtctgacggagcaacgccgcgtgagtgatgaaggttttcggatcgtaaagctctgttgttagggaagaacaagtaccgttcgaatagggcggtaccttgacggtacctaaccagaaagccacggctaactacgtgccagcagccgcggtaatacgtaggtggcaagcgttgtccggaattattgggcgtaaagggctcgcaggcggtttcttaagtctgatgtgaaagcccccggctcaaccggggagggtcattggaaactggggaacttgagtgcagaagaggagagtggaattccacgtgtagcggtgaaatgcgtagagatgtggaggaacaccagtggcgaaggcgactctctggtctgtaactgacgctgaggagcgaaagcgtggggagcgaacaggattagataccctggtagtccacgccgtaaacgatgagtgctaagtgttagggggtttccgccccttagtgctgcagctaacgcattaagcactccgcctggggagtacggtcgcaagactgaaactcaaaggaattgacgggggcccgcacaagcggtggagcatgtggtttaattcgaagcaacgcgaagaaccttaccaggtcttgacatcctctgacaatcctagagataggacgtccccttcgggggcagagtgacaggtggtgcatggttgtcgtcagctcgtgtcgtgagatgttgggttaagtcccgcaacgagcgcaacccttgatcttagttgccagcattcagttgggcactctaaggtgactgccggtgacaaaccggaggaaggtggggatgacgtcaaatcatcatgccccttatgacctgggctacacacgtgctacaatggacagaacaaagggcagcgaaaccgcgaggttaagccaatcccacaaatctgttctcagttcggatcgcagtctgcaactcgactgcgtgaagctggaatcgctagtaatcgcggatcagcatgccgcggtgaatacgttcccgggccttgtacacaccgcccgtcacaccacgagagtttgtaacacccgaagtcggtgaggtaaccttttaggagccagccgccgaaggtgggacagatgattggggtgaagtcgtaacaaggtagccgtatcggaaggtgcggctggatcacctcctttctaaggatattatacggaatataagaccttgggtcttataaacagaacgttccctgtcttgtttagttttgaaggatcattccttcgaaacgtgttctttgaaaactagataacagtagacatcacattcaattagtaatacaagatatcacatagtgattctttttaacggttaagttagaaagggcgcacggtggatgccttggcactaggagccgatgaaggacgggacgaacaccgatatgcttcggggagctgtaagcaagctttgatccggagatttccgaatggggaaacccaccactcgtaatggagtggtatccatatctgaattcataggatatgagaaggcagacccggggaactgaaacatctaagtacccggaggaagagaaagcaaatgcgattccctgagtagcggcgagcgaaacgggattagcccaaaccaagaggcttgcctcttggggttgtaggacactctgtacggagttacaaaagaacgaggtagatgaagaggtctggaaaggcccgccataggaggtaacagccctgtagtcaaaacttcgttctctcctgagtggatcctgagtacggcggaacacgtgaaattccgtcggaatccgggaggaccatctcccaaggctaaatactccctagtgaccgatagtgaaccagtaccgtgagggaaaggtgaaaagcaccccggaaggggagtgaaagagatcctgaaaccgtgtgcctacaagtagtcagagcccgttaacgggtgatggcgtgccttttgtagaatgaaccggcgagttacgatcccgtgcaaggttaagcagaagatgcggagccgcagcgaaagcgagtctgaatagggcgcatgagtacgtggtcgtagacccgaaaccaggtgatctacccatgtccagggtgaagttcaggtaacactgaatggaggcccgaacccacgcacgttgaaaagtgcggggatgaggtgtgggtaggggtgaaatgccaatcgaacctggagatagctggttctctccgaaatagctttagggctagcctcaaggtaagagtcttggaggtagagcactgattggactaggggcccctaccgggttaccgaattcagtcaaactccgaatgccaatgacttatccttgggagtcagactgcgagtgataagatccgtagtcgaaagggaaacagcccagaccgccagctaaggtcccaaagtatacgttaagtggaaaaggatgtggagttgcttagacaaccaggatgttggcttagaagcagccaccatttaaagagtgcgtaatagctcactggtcgagtgactctgcgccgaaaatgtaccggggctaaacgtatcaccgaagctgcggactgttcttcgaacagtggtaggagagcgttctaagggctgtgaagccagaccggaaggactggtggagcgcttagaagtgagaatgccggtatgagtagcgaaagaggggtgagaatcccctccaccgaatgcctaaggtttcctgaggaaggctcgtccgctcagggttagtcgggacctaagccgaggccgaaaggcgtaggcgatggacaacaggttgatattcctgtaccacctcctcaccatttgagcaatggggggacgcaggaggatagggtaagcgcggtattggatatccgcgtccaagcagttaggctgggaaataggcaaatccgtttcccataaggctgagctgtgatggcgagcgaaatatagtagcgaagttcctgattccacactgccaagaaaagcctctagcgaggtgagaggtgcccgtaccgcaaaccgacacaggtaggcgaggagagaatcctaaggtgatcgagagaactctcgttaaggaactcggcaaaatgaccccgtaacttcgggagaaggggtgctctgttagggtgcaagcccgagagagccgcagtgaataggcccaggcgactgtttagcaaaaacacaggtctctgcgaagccgtaaggcgaagtataggggctgacgcctgcccggtgctggaaggttaagaggagcgcttagcgtaagcgaaggtgcgaattgaagccccagtaaacggcggccgtaactataacggtcctaaggtagcgaaattccttgtcgggtaagttccgacccgcacgaaaggcgcaacgatctgggcactgtctcaacgagagactcggtgaaattatagtacctgtgaagatgcaggttacccgcgacaggacggaaagaccccgtggagctttactgcagcctgatattgaatgttggtacagcttgtacaggataggtaggagccttggaaaccggagcgccagcttcggtggaggcatcggtgggatactaccctggctgtattgaccttctaacccgccgcccttatcgggcggggagacagtgtcaggtgggcagtttgactggggcggtcgcctcctaaaaggtaacggaggcgcccaaaggttccctcagaatggttggaaatcattcgcagagtgtaaaggcacaagggagcttgactgcgagacctacaagtcgagcagggacgaaagtcgggcttagtgatccggtggttccgcatggaagggccatcgctcaacggataaaagctaccccggggataacaggcttatctcccccaagagtccacatcgacggggaggtttggcacctcgatgtcggctcatcgcatcctggggctgtagtcggtcccaagggttgggctgttcgcccattaaagcggtacgcgagctgggttcagaacgtcgtgagacagttcggtccctatccgtcgcgggcgcaggaaatttgagaggagctgtccttagtacgagaggaccgggatggacgcaccgctggtgtaccagttgttctgccaagggcatcgctgggtagctatgtgcggacgggataagtgctgaaagcatctaagcatgaagcccccctcaagatgagatttcccattccgcaaggaagtaagatccctgaaagatgatcaggttgataggtctgaggtggaagtgtggcgacacatggagctgacagatactaatcgatcgaggacttaaccatatttttgaatgatgtcacatctgttatctagttttgagagaacactctcaatttgtttggtggcgatagcgaagaggtcacacccgttcccataccgaacacggaagttaagctcttcagcgccgatggtagtcggggggttccccctgtgagagtaggacgccgccaagcaattgcacgttagtgcaattatggaggattagctcagctgggagagcatctgccttacaagcagagggtcggcggttcgagcccgtcatcctccaccattatgccggtgtagctcaattggtagagcaactgacttgtaatcagtaggttgggggttcaagtcctcttgccggcaccacttttatatgatataatactcaagtctcttgtagaagagccattagctcagttggtagagcatctgacttttaatcagagggtcgaaggttcgagtccttcatggctcaccattttacgcgggtgtggcggaattggcagacgcgctagacttaggatctagtgtctttatgacgtgggggttcaagtcccttcacccgcattatataggataacagttagaaaaactggacatcctgtctgcggaagtagttcagtggtagaacaccaccttgccaaggtgggggtcgcgggttcgaatcccgtcttccgctccaactataccatccacgccggggtggtggaattggcagacacacaggacttaaaatcctgcggtaggtgactaccgtgccggttcaagtccggccctcggcattatgttttgcgcccgtagctcaattggatagagcgtttgactacggatcaaaaggttaggggttcgactcctctcgggcgcgccatattttttaatagaatagatgggaaatcgggaagtagctcagcttggtagagcacatggtttgggaccatggggtcgcaggttcgaatcctgtcttcccgaccattttttatggggccttagctcagctgggagagcgcctgctttgcacgcaggaggtcagcggttcgatcccgctaggctccaccaaaagttttttaaaaaagttgttgactttgaagaagtgacgttgtataatgataaagttgctttaacaaagcagacaaacaaaatgatctttgaaaactaaacaagacaaaacgtacctgttaattcagtttttaaaaatcgcacagtgatgtgcgtagtcagtcaaactactttatcggagagtttgatcctggctcaggacgaacgctggcggcgtgcctaatacatgcaagtcgagcggacagatgggagcttgctccctgatgttagcggcggacgggtgagtaacacgtgggtaacctgcctgtaagactgggataactccgggaaaccggggctaataccggatggttgtttgaaccgcatggttcaaacataaaaggtggcttcggctaccacttacagatggacccgcggcgcattagctagttggtgaggtaacggctcaccaaggcaacgatgcgtagccgacctgagagggtgatcggccacactgggactgagacacggcccagactcctacgggaggcagcagtagggaatcttccgcaatggacgaaagtctgacggagcaacgccgcgtgagtgatgaaggttttcggatcgtaaagctctgttgttagggaagaacaagtaccgttcgaatagggcggtaccttgacggtacctaaccagaaagccacggctaactacgtgccagcagccgcggtaatacgtaggtggcaagcgttgtccggaattattgggcgtaaagggctcgcaggcggtttcttaagtctgatgtgaaagcccccggctcaaccggggagggtcattggaaactggggaacttgagtgcagaagaggagagtggaattccacgtgtagcggtgaaatgcgtagagatgtggaggaacaccagtggcgaaggcgactctctggtctgtaactgacgctgaggagcgaaagcgtggggagcgaacaggattagataccctggtagtccacgccgtaaacgatgagtgctaagtgttagggggtttccgccccttagtgctgcagctaacgcattaagcactccgcctggggagtacggtcgcaagactgaaactcaaaggaattgacgggggcccgcacaagcggtggagcatgtggtttaattcgaagcaacgcgaagaaccttaccaggtcttgacatcctctgacaatcctagagataggacgtccccttcgggggcagagtgacaggtggtgcatggttgtcgtcagctcgtgtcgtgagatgttgggttaagtcccgcaacgagcgcaacccttgatcttagttgccagcattcagttgggcactctaaggtgactgccggtgacaaaccggaggaaggtggggatgacgtcaaatcatcatgccccttatgacctgggctacacacgtgctacaatggacagaacaaagggcagcgaaaccgcgaggttaagccaatcccacaaatctgttctcagttcggatcgcagtctgcaactcgactgcgtgaagctggaatcgctagtaatcgcggatcagcatgccgcggtgaatacgttcccgggccttgtacacaccgcccgtcacaccacgagagtttgtaacacccgaagtcggtgaggtaaccttttaggagccagccgccgaaggtgggacagatgattggggtgaagtcgtaacaaggtagccgtatcggaaggtgcggctggatcacctcctttctaaggatattatacggaatataagaccttgggtcttataaacagaacgttccctgtcttgtttagttttgaaggatcattccttcgaaacgtgttctttgaaaactagataacagtagacatcacattcaattagtaatacaagatatcacatagtgattctttttaacggttaagttagaaagggcgcacggtggatgccttggcactaggagccgatgaaggacgggacgaacaccgatatgcttcggggagctgtaagcaagctttgatccggagatttccgaatggggaaacccaccactcgtaatggagtggtatccatatctgaattcataggatatgagaaggcagacccggggaactgaaacatctaagtacccggaggaagagaaagcaaatgcgattccctgagtagcggcgagcgaaacgggattagcccaaaccaagaggcttgcctcttggggttgtaggacactctgtacggagttacaaaagaacgaggtagatgaagaggtctggaaaggcccgccataggaggtaacagccctgtagtcaaaacttcgttctctcctgagtggatcctgagtacggcggaacacgtgaaattccgtcggaatccgggaggaccatctcccaaggctaaatactccctagtgaccgatagtgaaccagtaccgtgagggaaaggtgaaaagcaccccggaaggggagtgaaagagatcctgaaaccgtgtgcctacaagtagtcagagcccgttaacgggtgatggcgtgccttttgtagaatgaaccggcgagttacgatcccgtgcaaggttaagcagaagatgcggagccgcagcgaaagcgagtctgaatagggcgcatgagtacgtggtcgtagacccgaaaccaggtgatctacccatgtccagggtgaagttcaggtaacactgaatggaggcccgaacccacgcacgttgaaaagtgcggggatgaggtgtgggtaggggtgaaatgccaatcgaacctggagatagctggttctctccgaaatagctttagggctagcctcaaggtaagagtcttggaggtagagcactgattggactaggggcccctaccgggttaccgaattcagtcaaactccgaatgccaatgacttatccttgggagtcagactgcgagtgataagatccgtagtcgaaagggaaacagcccagaccgccagctaaggtcccaaagtatacgttaagtggaaaaggatgtggagttgcttagacaaccaggatgttggcttagaagcagccaccatttaaagagtgcgtaatagctcactggtcgagtgactctgcgccgaaaatgtaccggggctaaacgtatcaccgaagctgcggactgttcttcgaacagtggtaggagagcgttctaagggctgtgaagccagaccggaaggactggtggagcgcttagaagtgagaatgccggtatgagtagcgaaagaggggtgagaatcccctccaccgaatgcctaaggtttcctgaggaaggctcgtccgctcagggttagtcgggacctaagccgaggccgaaaggcgtaggcgatggacaacaggttgatattcctgtaccacctcctcaccatttgagcaatggggggacgcaggaggatagggtaagcgcggtattggatatccgcgtccaagcagttaggctgggaaataggcaaatccgtttcccataaggctgagctgtgatggcgagcgaaatatagtagcgaagttcctgattccacactgccaagaaaagcctctagcgaggtgagaggtgcccgtaccgcaaaccgacacaggtaggcgaggagagaatcctaaggtgatcgagagaactctcgttaaggaactcggcaaaatgaccccgtaacttcgggagaaggggtgctctgttagggtgcaagcccgagagagccgcagtgaataggcccaggcgactgtttagcaaaaacacaggtctctgcgaagccgtaaggcgaagtataggggctgacgcctgcccggtgctggaaggttaagaggagcgcttagcgtaagcgaaggtgcgaattgaagccccagtaaacggcggccgtaactataacggtcctaaggtagcgaaattccttgtcgggtaagttccgacccgcacgaaaggcgcaacgatctgggcactgtctcaacgagagactcggtgaaattatagtacctgtgaagatgcaggttacccgcgacaggacggaaagaccccgtggagctttactgcagcctgatattgaatgttggtacagcttgtacaggataggtaggagccttggaaaccggagcgccagcttcggtggaggcatcggtgggatactaccctggctgtattgaccttctaacccgccgcccttatcgggcggggagacagtgtcaggtgggcagtttgactggggcggtcgcctcctaaaaggtaacggaggcgcccaaaggttccctcagaatggttggaaatcattcgcagagtgtaaaggcacaagggagcttgactgcgagacctacaagtcgagcagggacgaaagtcgggcttagtgatccggtggttccgcatggaagggccatcgctcaacggataaaagctaccccggggataacaggcttatctcccccaagagtccacatcgacggggaggtttggcacctcgatgtcggctcatcgcatcctggggctgtagtcggtcccaagggttgggctgttcgcccattaaagcggtacgcgagctgggttcagaacgtcgtgagacagttcggtccctatccgtcgcgggcgcaggaaatttgagaggagctgtccttagtacgagaggaccgggatggacgcaccgctggtgtaccagttgttctgccaagggcatcgctgggtagctatgtgcggacgggataagtgctgaaagcatctaagcatgaagcccccctcaagatgagatttcccattccgcaaggaagtaagatccctgaaagatgatcaggttgataggtctgaggtggaagtgtggcgacacatggagctgacagatactaatcgatcgaggacttaaccatatttttgaatgatgtcacatctgttatctagttttgagagaacactctcaatttgtttggtggcgatagcgaagaggtcacacccgttcccataccgaacacggaagttaagctcttcagcgccgatggtagtcgggggtttccccctgtgagagtaggacgccgccaagcaagcttaaacccagctcaatgagctgggttttttgtattttggtttattggtatcataaaattccacttaactgtataatataataactttataccgaattttaaatcagcaatcaggttttgtggaccgggaaaatggaaataatgaaggatagagcgagaaagttgaaaattctcgagaaacggcttatagtaagattaaagtcaaatatagtcaaagtcagtaaaggagggggttgagtgggacataatatttctgacatcattgaacaatatttaaaacgagtgttagatcaaaatggcaaggaaattttagagattaaacgaagtgaaattgcagataaatttcaatgcgttccttcccaaataaattatgtcatcaacaccagatttacaagcgaaagaggatatattgttgagagcaaacgcgggggtggcggttatatcagaatcattaaaattaaaatgaacaatgaagttgtcctgatcaataatattatttctcaaattaatacccatttgtctcaagcagcctctgatgacattattttaaggctattagaagacaaggtaatttcagaaagagaagcaaaaatgatggtcagcgtaatggaccgctcagttttacacattgacttgcctgaacgtgatgaattaagagcgagaatgatgaaggcaatgctgacttctttaaaattaaaataagcgggtgaaaagattgatttgtcaagagtgccacgagagaccagccacttttcactttacaaaggttgttaacggagaaaaaatagaagttcatatttgtgaacaatgtgccaaagaaaatagtgattcatatggtataagtgcaaatcagggtttctctattcataatttactttcgggtttactgaacatggattcttcatttcaaaatgcaggaactcaaatgttcagtcactcggagcaaatatctgcttgtccgaaatgcggaatgacttttcagcaattcagaaaaattggccgttttggatgttctgaatgttacaaaacatttcatagcaacattacacctatcctacgtaaagtgcacagcggaaacactttgcatgcagggaagataccgaaacgaataggcggcaatcttcatgtcagacggcagattgatatgctaaaaaaggaattagaatccttaatccatcaagaagaatttgaaaatgcagctcatgtaagagatcaaattcgttcattagaacaatcactcaaaagtacagatagtgaggaggaacaggagtaatgtcgctaaagcattttattcaggacgcactaagcagttggatgaagcagaaaggacctgaaagtgacattgtactcagcagccgcatacgtttagcaaggaactttgagcatattcggttccctacgcggtattccaatgaagaagcctcatccatcatacagcaatttgaagatcagttttcagagcaagaaattcccggaatcggcaaatttgttttgattagaatgaatgatgcacagcctttagaaaagcgtgtacttgttgaaaaacatctaatcagtcctaatctgacagagtctccttttggcggctgtttgctttctgaaaatgaggaagtaagtgtcatgttaaatgaagaggaccatattagaattcagtgtcttttccctggatttcagcttttagaagcaatgaaagccgcaaaccaggtcgacgactggattgaagaaaaagttgattatgcattcaatgagcaaagaggatacttaaccagctgtcctacaaacgtaggtacaggtttaagggcttcggtcatgatgcatctgccggcactggttttaactaggcaaataaatcgaattataccggcaattaatcaattaggcttagttgttagaggaatttatggggaaggcagcgaagcagtagggaatatctttcaaatttcaaatcagatcacgcttggtaagtcagagcaggatattgtagaggatcttaacagtgttgctgctcagttgattgaacaagaacgatctgcccgagaagcgatttatcaaacttctaaaatcgaacttgaggatcgggtatatcggtcttatggggtcttgtctaattgccggatgatagaatcgaaagaaactgcaaagtgcctttcagatgttcggttaggcatagacctaggcattataaaaggactttcaagcaacatacttaacgaacttatgattttgacgcagccaggatttttacagcaatactcgggaggcgctttgcgtccgaacgaaagggacattcgaagagcggctctcatcagagaacggcttcacttagaaatgaatgggaaacgacaggaggatgaatcgatatgatgtttggaagatttacagaacgagctcaaaaagtactggcgctagcacaggaagaagcacttcggttaggtcataataacattggcactgagcatattttattaggactggtaagagaaggagagggcattgctgctaaagctcttcaagcgcttggactcggttcagataaaattcagaaagaagtagaaagtttgatcgggcgcgggcaggaaatgtctcaaacgattcattatactcctagagctaaaaaagtcattgagctttcaatggatgaggcaagaaaactcggtcattcttatgttggaacagaacatattcttcttggactgattcgtgaaggagaaggtgttgctgcgagagttttgaataatctcggtgtcagcttaaataaagcaagacagcaggtgctccagcttctaggaagtaatgaaacaggatcatcagcggcaggaacaaacagcaatgcgaatacgcctacgcttgacagcttggcaagagacttaactgctattgcgaaggaagacagccttgaccctgtaatcggcagaagcaaggagatccagcgtgtcattgaagtattaagccgcagaacgaaaaacaaccctgttctcattggggaaccaggtgtaggtaaaacggctatcgcagaaggtttggcacagcaaattatcaataatgaagtacccgaaattttgcgtgataaacgtgtgatgacattagacatgggaacagttgttgccggcacaaaatatcgcggagaatttgaggatcgcctgaagaaggtcatggatgaaattcgccaggcaggaaatatcattctattcatcgatgagctccatacattaatcggggcaggcggagcagaaggtgctattgatgcatctaatattttaaaaccttcacttgctcgcggcgaactccaatgtattggtgcaacgactcttgatgagtaccgtaaatatattgaaaaagatgcagcactggaacgccgttttcagccgattcaggttgatcagccatctgtagatgaaagtattcaaattttacaaggtctgcgtgacagatacgaagcccaccaccgcgtttctatcactgatgatgccattgaagctgcggttaagctttctgacagatatatttctgaccgcttccttccggataaagcaattgacttgatcgatgaagcaggttcaaaggtgagactgcgctcatttacaacgcctcctaacttaaaagagcttgagcagaagcttgatgaggttcgtaaagagaaggatgcggcagtgcaaagccaagagtttgaaaaagctgcttccttgcgtgatactgaacaacgcctgcgcgagcaagtagaggatacgaagaaatcatggaaagagaagcaagggcaggaaaactcagaggttactgtggatgatattgcgatggttgtatccagctggaccggtgtgcctgtatctaaaatcgcccaaactgaaactgataagcttctcaatatggaaaacattcttcattcccgcgtcatcggccaggatgaggcagttgtagctgttgcaaaagccgtcagacgtgcgagagcagggttgaaagatcctaaacgcccaatcggctcattcattttcttaggccctacaggtgtaggtaaaacagaacttgcacgagcacttgctgaatccatttttggcgatgaagaatccatgatcagaattgacatgtctgaatacatggaaaaacactcaacttcaagacttgttggttcacctccgggatatgtgggatatgatgaaggcggtcaattgacagagaaagtcagaagaaaaccttactctgtcgtgcttcttgatgagatcgagaaagcgcaccctgatgtcttcaatatccttctgcaagttcttgaagacgggcgattgactgattctaaaggacgcacagtcgatttccgcaataccattctgatcatgacatcaaacgtcggagcaagtgagctgaaacgcaataaatatgtcggctttaacgttcaggatgaaactcaaaatcataaagacatgaaagataaagtgatgggtgaattgaaacgagcgttcagacctgagttcatcaaccgtattgatgaaatcattgtcttccattcacttgagaaaaaacatcttactgaaattgtgtcattaatgtctgatcaattaacgaaacgcctgaaagaacaagatctttctatcgaattgacagatgctgcaaaagcgaaagtcgcggaagagggcgttgacctggaatacggtgcccgtccgttaagaagagcgatccaaaaacatgtcgaggatcgtttatctgaagaactcctcagaggaaatattcataaaggacagcatattgttcttgatgtagaagatggcgaatttgtcgtaaaaacgactgctaaaacgaattaatatagaagacggaaatgaggcatacagcatgtaagtgtatgcctcactttcatatcaagaaatagaacaagggagaggtcttacactatatatggctaaaacaaaatcgaaattcatctgccaatcctgcggctacgagtctccaaaatggatggggaaatgtccgggctgcggtgcttggaatacaatggtggaagaaatgattaaaaaagcaccggccaatcggagagcggctttttctcattctgttcaaactgtacagaaaccttcacctattacatcaatcgaaacatcagaagaaccccgcgtcaaaacccagcttggcgagtttaacagagtactcggcggaggtgtcgttaaaggctccctcgttttaattggcggtgatcctggtatcggaaagtcaacgctattactgcaggtttccgctcaattatcaggctcatcaaacagtgtcctgtatatttcgggagaagaatctgtaaagcaaacgaagctgcgagcagaccgtctcggcattaataatccgtcactgcatgttttatctgaaaccgatatggagtatatttcgtctgctatacaagagatgaatccagcgtttgtcgttgttgactctattcaaacggtttaccaaagcgatattacatcggctccaggcagtgtgtcacaggtcagagaatgtaccgctgagctgatgaaaattgcaaaaacaaaaggtattccgatttttatcgtagggcacgtaacgaaagaagggtctattgcaggtccaagactgttggagcatatggttgacactgttttatattttgaaggagaacgccaccatactttccgtattttgcgggctgtaaaaaaccgtttcggatctacaaacgaaatgggcattttcgaaatgcgggaagaggggctcactgaggttttgaatccttcggaaattttcttagaagaacgctctgctggttccgcaggctcgagtatcactgcctctatggagggcactagaccgattctcgttgaaattcaggcgctcatctcgccaacaagctttggcaacccaaggcgtatggcaacgggaatagaccataacagggtctctctgttaatggctgtgttagaaaaaagagttggactgctgctgcaaaatcaggatgcttatttgaaagtggctggcggcgttaagcttgatgaaccggcaattgatcttgccattgcgattagtatcgcatcaagctttagagacacacctccaaatcctgcagattgttttattggagaagtgggattaaccggagaagtccggcgggtttcaagaattgaacagcgtgtgaaagaagcggcaaagcttggttttaaacgcatgatcatacccgcggcaaatctggatggatggacaaaaccaaaagggattgaggttatcggagtagcaaatattgcagaagcgcttcgtacttcattaggaggataatagatggaaaaagagaaaaaaggggcgaaacacgagttagacctgtcatctatattgcagtttgttgctccgggtacaccgctcagagcggggatggaaaacgtcttgagagcaaatacaggcggtctgattgttgttggatataatgataaagtaaaagaagtggtggacggcggctttcacataaacacggctttttctccggcgcatttatatgagctggctaaaatggatggagcgatcattttaagtgattctggtcaaaagatcctctacgcgaatactcagctgatgccggatgccacaatttcttcatcagaaacaggaatgcggcacagaactgccgaaagagtagctaagcaaactggctgtcttgtaatcgctatttctgaaagaagaaatgtcataacgttatatcaggaaaacatgaagtatacactaaaagacataggatttattttaaccaaggcgaaccaagccattcaaacacttgaaaaatataagacaatcctcgataaaacgattaatgcactgaacgcgttagagtttgaggaacttgttaccttcagtgatgtcttgtctgtcatgcatcgttatgaaatggtactgagaatcaaaaacgaaattaatatgtatatcaaagagctggggacagaagggcatctgatcaaactgcaagtcattgaattgattacggatatggaagaagaggccgctttatttattaaggactatgtaaaagaaaagattaaagatccgtttgttctcttgaaggagctgcaggatatgtccagttatgatctgctggatgattccattgtgtataagcttctcggttaccctgcttctactaatcttgatgattatgtattgccgagaggatacaggctgttaaataagataccgcgtcttccgatgccgattgttgaaaatgttgtagaagcatttggagtcctgccaaggattattgaggcgagtgcagaagaattagatgaagtagagggaatcggtgaagtacgagcccaaaaaatcaaaaaaggattaaaacgcctgcaagagaagcattatttagacagacaactgtgatttcggttaaaaccttatgaatacgggtatattaatgttggtttttgtttattctgatattcgtaggatgcataagactttgtgaaattaaaatgttaaaaaaggaggtgggggtatgttaaaacgaatagttcaggcgttcttcattatttttggcggcgttgttggtatatttttgatacctgaattgtttgtactgttaaatatacaggacatacctttaataacaaacgcatatacgtctgcggcaataggagcaattatcttttttctcatcagtatatggggtacagaatacgttgtgaactgggtgaagtggatagaggattcattgttaaaagcgccggttccagatttgttatttggaagtcttggcttagtttttggacttataattgcttatcttatcgtaaatgttattcctttagacaatataccttaccgcatattcagcacaataattcctgtatttttggctttcttcctcggttatctcggcttccaggtgggctttaagaaaaaggatgaattgatcagcctgttttccatttccgccagaatgcaaaagaaaaaaggaacagctgatgaagaacatgaggttcaagacaagaagctgaaaattttggacactagtgttattattgatgggagaatagcagatatttgtcagactggttttttagagggagttatcgtgattccgcagtttgtccttgaggaattgcagcatattgcagactcttcagatgttttaaaacgaaacagaggacgccgcggtcttgatatcctgaaccgcattcagaaagaattagacattgaagttgaaatttacgaaggcgactttgaagatattcaggaggttgacagcaagctcgtcaaacttgctaagctgacatccggggtcgttgtgacgaatgattttaatttaaataaagtgtgcgagcttcagaaggtagcagtattaaacattaatgaccttgccaatgcggtcaagcctgttgtgcttcctggcgaggaaatgaatgttcaggtcattaaggacgggaaagagcataatcagggagttgcctacttggatgacggtacgatgattgtcgttgaagaaggacgaaattatatcggcaagcatattgatgtactcgtcacaagtgtgctgcagacagcagcgggacgaatgatttttgcgaagcctaagctgttggagaaggcgctgtaaagggagaagaaacaatgagttatgatgtggtgattcctgcagccggacagggaaagcggatgaaggcagggagaaataaactgttcattgatctgaagggagacccggtgatcatacacacgttaagagtgtttgacagccaccggcagtgcgataaaatcattttggtgattaacgagcaggagcgggagcactttcaacacttgctgtccgattacccgttccaaacttcaattgagcttgttgcaggcggagaagagcgtcagcacagtgtgtataaggggctgaaagccgtaaagcaggaaaagattgtccttgtacatgacggtgcccgcccatttataaaacatgaacaaattgacgaactgatcgcagaggcggaacagacaggagcggccatccttgctgttccggtaaaagatacgattaaacgcgttcaagatttacaagtcagtgagacgattgaacgttcaagcttgtgggctgtccaaacgccacaagcttttcgtctttctttattgatgaaggctcacgctgaggccgagcgcaagggatttttagggacggatgacgccagcctcgttgaacagatggagggcggttcggtccgtgttgtagaaggcagctatacaaatattaagctgacgacgccagacgatttgacgtcagctgaagctatcatggaatcagaaagtgggaataaacatgtttagaattggacaaggatttgatgtgcatcaattagtggagggccgtcctctcattattggcggaattgaaatcccgtacgaaaaagggctgcttggccattctgatgcagacgtattgctgcatactgtcgctgacgcctgcctgggagctgtgggtgaaggagacatcggcaagcattttcctgacacagatcccgagttcaaggacgcagattctttcaaattacttcagcatgtctggggaatcgtgaaacagaaggggtatgtccttgggaacattgattgcaccatcatagcgcaaaagccgaagatgctgccgtacatagaagatatgagaaaaagaattgctgaaggccttgaggcagaagtttctcaagtaaatgtaaaagcaacaacgacagaaaagcttggatttacaggccgggcggaaggaatagcggctcaggcgacagtactgatacaaaaaggctaacttgttttgatgccgggtctatttggtggtagaatagattcatacatttttgcctgaggccatacatgacatgaaaggaagtatttgaaaatgggaaacgaagtacgcgtccgttatgcaccgagtccaaccggacatttgcatattggaaatgccagaacggcgctttttaattatttatttgcccgcaatcaaggcggtaagtttatcattcgagttgaggatacagataaaaagcgcaatattgagggcggagaacaaagccagctgaattatctgaagtggctaggtattgactgggatgagagtgtggatgtcggaggagagtacggcccataccgtcagtcagagcgtaacgatatctataaagtgtactatgaagagcttcttgaaaaagggcttgcttataaatgttactgtacggaagaagagcttgaaaaagagcgtgaagaacagattgcccgcggagaaatgcctcgttattccggaaaacacagagacctgactcaggaagaacaggagaaatttatcgctgaaggcagaaaaccaagtattcgtttccgcgtgccggaaggaaaaatcatcgccttcaatgatatcgtaaaaggcgaaatttcttttgaatcagatggcatcggcgactttgttattgtgaaaaaggacggtacgccgacttacaacttcgcggtagcgattgatgactacttaatgaaaatgacacacgtgctgcgcggtgaggatcatatttctaacacaccgaaacagattatgatttatcaagcattcggatgggatattcctcagttcggacacatgacgctgatcgtaaacgaaagccgtaaaaagctcagtaaacgtgatgaatccattattcaattcatcgagcagtacaaagagcttggctacctgccagaagcactgttcaactttatcggcctgttaggctggtcaccggttggagaagaagagcttttcacaaaagagcagtttattgaaatttttgatgtaaatcgtttatctaaatcaccagctttgtttgatatgcataagctaaaatgggttaacaaccaatatgtgaagaagctggatcttgatcaggttgttgaattgacgcttccgcatttgcaaaaagccggcaaagttggcactgagctttctgctgaagaacaagaatgggttcgtaaactgatttccctgtatcatgagcaattaagctacggtgcggaaattgttgagctgactgatttgttctttacggatgagatcgagtataatcaagaagcgaaagctgttctggaagaagaacaggttcctgaagtgctcagtacattcgcagcgaagcttgaagagcttgaggagttcactccggataacatcaaagcatcgatcaaagcagtgcagaaagaaactggccataaagggaaaaaactgtttatgccgattcgtgttgctgtaacagggcaaactcatggtccggaactgccgcaatcaattgaattgatcggtaaagagactgcaattcagcgtttaaagaatatctaaataaatgattgttgacagggaagagtataaagctttaggccattacagaaaggatctccattggctgagagagatccatgagccgggttttagaagtgcgcccttaagacctttgaagaacgttttttgaaatcagtattcaaaggcggccgccgccgttacaggctgaagttgggagagcagaagtctgcttttcaaacagagtggaaccgcgcggttaaagcgtctctgtcatgtttacatgcagaggcgctttttttattgggtagaggaaatcagatagagaaacggggggaagcatgtgttttttagaatgctcaaagaagacattgatactgtgttcgatcaagatcccgcagcaagaagctattttgaagtgattttaacttattccggtttacatgctatatgggcgcatcggattgcacatgctttatataaacgaaaattttatttccttgcacgccttatatctcaagtaagccgattttttaccgggatagaaatccaccccggcgccacaatcgggagaagatttttcatagaccacggcatgggggttgtcattggggagacatgtgaaatcgggaataacgttaccgtttttcagggggttaccctcgggggaacggggaaagaaaagggaaaaaggcacccaacgattaaagatgacgcattgatagccacaggtgctaaagtgctcggttctattacggtcggtgaaggctcaaagattggggctggttcagtagtgctgcatgatgttcctgatttttcaacagttgtcggtatccctggacgggtcgttgtacaaaatggcaagaaagtaagacgcgatttaaaccatcaggatttgcccgatccggttgctgaccgctttaagtctttggaacagcagattttagagctgaaggcagaacttgaagacagaaaagaaaggatcaaccaaaaatgacaatcacactttataatacattgactagacagaaggaaacattcgttcctcttgaagagggaaaagtgaaaatgtatgtatgcggacccacggtttacaattacattcatatcgggaacgcgcgtccggcaatcgtttacgatacggttcgaaactatttagagtataaaggctatgatgtgcagtatgtctctaacttcacagacgtagacgataaactaattaaagcggcaaatgaactcggtgaggatgtacccaccatttcagagcgttttattaaagcatactttgaagacgtaggtgcgctcggctgccgaaaagccgaccttcatccgcgagtaatggagaacatggatgccattatcgaattcgtagatcagctcgtgaaaaagggctacgcatatgaatcagaaggtgacgtatatttcaaaaccagagcgtttgaagggtacggaaagctttctcagcaatcaatcgatgaacttagatcaggtgcacgcatccgagtcggcgagaaaaaagaagatgctcttgatttcgcactgtggaaagcggcaaaagaaggagaaatctcttgggatagcccttgggggaaaggacgtccgggctggcacattgaatgctcagcaatggtgaaaaagtatctcggtgaccagattgatatccatgcgggcggacaggatttaacattccctcaccatgaaaacgaaattgcgcaatctgaggcgctaacaggcaaaacgtttgcgaagtattggcttcataatggttatatcaatattgataatgaaaaaatgtcaaaatcactaggcaactttgtgcttgtgcatgacatcattaaacagcatgatccgcagcttttgagattctttatgctatctgttcattatcgccatccgattaactattcagaagagcttctggagaatacgaaaagcgcgttcaaccgtttaaaaacagcgtacagcaatcttcagcaccgtctgaacagcagtacgaatttaaccgaagatgacgatcaatggcttgaaaaagttgaagaacaccgcaaagcattcgaagaagcgatggacgatgattttaatacggcgaatgccatttcagtcttgtttgacttagcgaaacacgccaattattatcttcagaaagatcatacggctgatcatgtgattacggcgtttattgagatgtttgaccgcattgtttctgtcctcggtttttcgttgggtgagcaggaacttctcgatcaagagattgaagacttaatcgaaaagcgaaatgaagcgcgccggaatcgcgattttgcattgtcagaccagatccgcgaccagctgaaaagcatgaatatcattcttgaagatacggctcaaggcactcgctggaaacggggagaataacagatgcttgaatttgatacgataaaagattctaagcagcttaacggtcttgcgcttgcttatataggtgatgccatttttgaagtgtatgtcaggcatcacctgcttaagcagggctttaccaaaccaaatgatcttcataagaaatcaagccggattgtttcagcaaagtcacaggctgagatcctattttttctgcagaatcaatcattttttacggaagaagaggaagcggtgctgaaaagaggcagaaatgccaagtcagggacaacacctaaaaatacagatgttcagacgtaccgctacagtacagcatttgaagcgcttctgggctacctttttctagagaaaaaagaggaacgacttagtcagctcgtagccgaagctatacaattcgggacgtcagggaggaaaacaaatgagtcagcaacatgattacgtcatagggaaaaatgcagtgatcgagacgttaaaatctgatcggaagctgtataagctgtggatggcggaaaacaccgtaaagggacaagcacagcaagtgattgagcttgccaaaaagcagggaatcacgattcaatacgtcccgagaaaaaaactcgatcaaatggtgacaggacagcatcagggcgtagtggcacaggttgcagcgtatgaatatgcagaactggacgatttatataaagcagccgaagaaaaaaatgaacagcctttcttcctcattctggacgagcttgaagaccctcataatcttggttccattatgaggacagcagatgcggtcggcgctcatggcatcgtcattccaaaacggagagctgtcgggctgacaacaacagtggcaaaagcttcaacaggagcaattgagcacattcctgtagcaagagtcaccaatttggcacggacgttagaagagatgaaagagcggggaatctgggttgtcggaacggatgcgtccgcgcgtgaggattaccgtaatatggacggcaatatgcctttggctctagtcatcggaagtgaaggaaaagggatgggccgccttgtgaaagaaaagtgcgattttctcattaaactcccgatggccggaaaggtaacttcactaaatgcatctgtcgcggctggtcttttgatgtatgaagtctaccggaaacgaaaccctctgggagaataaagacccatggatatcctgttagtagacgggtacaacatgattggagcctggccgcagctgaaggatttaaaagcgaacagttttgaagaggcgagagacgtactgattcagaaaatggcggaatatcaatcgtatacaggaaacagggttattgttgtttttgacgcgcatctcgtaaaagggcttgagaaaaaacagaccaaccatagagttgaagtaatttttacaaaagaaaatgagacggctgatgagcggatagaaaagctcgctcaggctttgaataatattgcgactcaaattcacgttgcgacctctgactatactgagcagtgggcgattttcggacagggggcattgcggaaatcggcccgggagcttttgagagaggtagaaacgattgaaaggcgaatagagagacgggtaagaaaaatcacttccgaaaagccggcgggtaaaattgctttatcggaagaggttttgaaaacgtttgaaaagtggaggcggggagacttagattaagttgacgcttttttgcccaatactgtataatatttctatctacgtgcgccggggggatcggagtgaatctacagaacaacaagggaaaattcaacaaagagcagttttgccagttggaggacgagcaggtcattgaaaaggttcatgttggggacagtgatgcgttagattacttgattacgaagtaccgaaactttgttcgggcaaaagcaagatcctatttcttaataggggcggacagagaggatattgttcaggaaggcatgataggcctctataagtctattcgtgacttcaaagaggacaagcttacctcattcaaagctttcgcagaattatgtattacccgccaaattattaccgcaataaagacagctactcgccagaaacacattcctttgaattcctacgtctcattagataaaccgatttttgatgaagaatcagaccgaacgctgctggatgtcatttcaggagcgaaaaccttaaatcctgaggaaatgatcattaatcaggaagaatttgatgatattgaaatgaaaatgggagaactattaagtgatttagagagaaaagtactcgtcttatatctcgacgggagaagttaccaagagatttctgatgaactgaaccgacatgtgaaatcgatcgacaatgcccttcagcgtgtgaaacgcaagctggagaagtacttggaaattcgcgaaatcagtttgtaataggaatttatgctatattgacagtatttttctgactatgatatgttactaaagataagaactaatgtctatttagaaaaaggtgtaatgacatgagaaaaaagattacgttagcatgcaagacatgcggaaaccgtaattatacgacaatgaagagctctgcatcagcggctgagcgattagaagtaaagaaatactgcagtacttgcaattcacatacagctcatcttgaaacaaaatagtttttgcgcttttaaattgtggaggtcttttacatgcgtattatgaaattctttaaagatgttgggaaagaaatgaaaaaggtaagctggcctaaaggaaaagagttaacgcgttataccattacggtaatttcaacagttatcttttttgttatcttttttgccctccttgacacaggaatttctcaattaattcgtttaatagttgaataatgatcagcaatacgtgctataatagatcataatattacttgccaaaacccgttcagcgggttttttattgtggcttaaaatgaaagttatcataggcttgccgcctattttttgaagcgttatggtaattcactaaaaccaaatgcggggagggaaggactggacagtcctgaatagaatggaaaagaattggtatgttgttcacacgtactctggttatgagaataaagtaaaagccaacttggaaaagcgtgttgaatcaatggggatgcaggataaaattttccgtgtagtcgtacccgaagaagaagaaacggatatcaaaaacggcaagaaaaaagtcgtgaaaaagaaagtattccctggttatgtgcttgttgaaattgtaatgacagacgactcttggtatgtcgtccgcaacacgccgggcgttactggattcgtaggatctgccgggtcaggttcaaaaccgacgccgcttcttccgggggaagcagaaaccattctgaagagaatgggcatggatgaacgaaaaactgatattgactttgaactgaaagagacagtgaaagtgatagacggaccttttgctaactttacaggatcaattgaagagattgattatgataaaagcaaggtcaaagttttcgttaatatgtttggccgtgaaacgccggttgagctggaatttacccaaatcgataaattgtaatgtgaaaaaacttgaaattgctatatataaatgataatatagcaaaggtacgtcttggacttatccaaggcaactagcatgatatttcgtcattcatataaagaatgaaaccttgagtgggagggtttaccctattaccacatcacggacttaaggaggtgtgtctcgtggctaaaaaagtagttaaagttgtaaaattgcaaattcctgctggaaaagctaacccagcaccaccagttggacctgcacttggtcaagccggtgttaacatcatgggattctgtaaggagtttaacgctcgtacagctgaccaagctggtttaatcattcctgttgaaatttcggtttacgaagaccgttcatttacatttattacaaaaactccacctgctgcagtattgcttaaaaaagcagctggaattgagtctggttctggtgaaccaaaccgtaataaagtggcaaccgttaagcgcgataaagtacgcgaaatcgctgaaacgaaaatgcctgacttaaacgcagcagacgttgaagcggcaatgcgcatggttgaaggtactgcccgcagtatgggtattgtaatcgaggattaatttgtttcttgtcgggttgcgagttttaacaagttcgcaacccttattcgtgggaggttattccgctataaccacataaggaggaaattttaaaatggctaaaaaaggtaaaaagtacgttgaagctgctaagcttgtagaccgttctaaagcttacgacgtctctgaagcagtagctctcgttaaaaaaacaaacacagctaaattcgacgctacagttgaagtggctttccgtttaggggttgaccctcgtaaaaacgaccagcaaatccgtggagcagttgtgcttccaaacggaactggtaaaactcagcgcgttctcgttttcgcaaaaggcgaaaaagcgaaagaagctgaagctgctggtgcagatttcgtaggcgatactgactacatcaacaaaattcaacaaggctggttcgatttcgatgtaatcgtagctacacctgacatgatgggtgaagttggtaaaatcggtcgtgtacttggaccaaaaggtttaatgccaaaccctaaaactggtacagttactttcgaagttgaaaaagctatcggcgaaatcaaagctggtaaagttgaataccgcgttgataaagctggaaacattcatgttcctatcggtaaagtttctttcgaggatgaaaaacttgttgagaacttcacaacaatgtacgatacaatccttaaagctaaacctgctgcagctaaaggcgtttacgtgaaaaacgttgctgtaacttctactatgggacctggtgtcaaagtagactcttcaacttttaacgtaaaataatattgacatgacatcaacattctgatattattcaaaatgttgtaaaatagaatatcatttataccgtagacagtaggggcctaaccgcttaattatcctaccgaggtgtatattatcacagctattacgttacgtatgcttgtatatacagcctccatgtctcatggaggctttttatatggaatccgtcgtctcagtcgtgatcacctaacggtataagtgttacacaagaatctacaggaggtgtaaccatgagcagcgcaattgaaacaaaaaaagttgttgttgaagaaattgcttctaaactgaaagaaagtaaatcaacgatcatcgttgactatcgcggacttaacgtttctgaagtaactgaacttcgtaaacagcttcgcgaagctaacgttgagttcaaagtttacaaaaatacgatgactcgccgtgcggttgaacaagctgagcttaatggtttgaatgatttcttaactggaccgaacgcgatcgcattcagcactgaagatgttgtcgctccggctaaagttcttaatgacttcgctaaaaatcacgaagctcttgaaatcaaagctggcgttatcgaaggtaaagtttctactgttgaagaagtgaaagctcttgctgaacttccatcacgcgaaggcttgctttctatgttgcttagcgtacttcaagctccagttcgcaaccttgctcttgctgcaaaagctgtggcagaacaaaaggaagaacaaggcgcttaatctaatcagtttttcataaattaaaacaaaatggaggaattacaaatggctttaaatatcgaagaaatcattgcttccgttaaagaagcaactgtacttgaattgaacgacctagtaaaagcaatcgaagaagaatttggcgtaactgctgctgctcctgtagctgtagctggcggagctgctgctggcggagctgctgaagagcaaagcgaattcgatcttatccttgctggtgcaggatctcaaaaaatcaaagttatcaaagttgtacgtgaaatcactggtcttggcttgaaagaagctaaagaacttgttgacaacactccaaaaccacttaaagaaggtattgctaaagaagaagctgaagagcttaaagctaaacttgaagaagttggcgcttctgtagaagttaagtaatcttcacttacctgtaggggaagctcgcttttatgaggcgagctttttctttgccattctttaagccatgaaaaaaggaggttctaataatgagtgagcactattattcagaaaaaccttcagtaaaaagcaacaagcaaacctggtcttttaggcttcggaataaagatttcacgtttaccagcgacagcggggttttttctaaaaaagaagttgatttcggctcccgcctgctgattgattcttttgaagagcctgaggttgagggcagctttttggatgtaggctgcgggtacggcccgattggtttatcgctggccagcgactttaaagaccggactatccacatgattgacgttaatgagagagccgtagaactatcaaatgaaaatgcggaacataacggaataacaaacgttaagatttatcaaagtgatttgttttcaaacgttgattctgctcaaacatttgcttctattcttacaaatcccccaatccgagccggaaaaaaagttgtccatgctatctttgagaaaagcgctgaacacttaaaagcttcaggtgaattgtggatcgtcatacagaaaaagcaaggcgcgccttctgccattgaaaagctcgaggaactgttcgatgaagtttccgtcgttcaaaaaaagaaaggctattatatcataaaagcaaaaaaagtttgactcggtattttaactatgttaatattgtaaaatgccaatgtatatattttgcttgatatgatgaattgtcaatatctatgtataaattatacaagtatggaaatgctaataaaatcggtatttgtttttggatgtggttttcttaattagaaacccttttttcttttgtcttgtaaaagtattttctttctttggaagaaatgcttattacacatataatacgcatgatttgaggggtgaatcagttgacaggtcaactagttcagtatggacgacaccgccagcgcagaagctatgctcgcattagcgaagtgttagaattaccaaatctcattgaaattcaaacctcttcttatcagtggtttcttgatgagggtcttagagagatgtttcaagacatatcaccaattgaggatttcactggtaacctctctcttgagttcattgattatagtttaggtgagcctaaatatcctgtagaggaatcaaaagaacgtgatgtgacttactcagctccgctaagagtgaaggttcgtttaattaacaaagaaactggagaggtaaaagaccaagatgtcttcatgggtgatttccctattatgacagatacaggtacttttatcattaacggtgcggaacgtgttatcgtttcccagcttgttcggtctccaagtgtatatttcagtggtaaagtagacaaaaacggtaaaaaaggttttaccgcaactgtcattccaaaccgtggcgcatggttagaatacgaaactgatgcgaaagatgttgtttatgtccgcattgatcgcacacgtaagttgccggttacggttcttttgcgtgctctcggcttcggctccgatcaagagattcttgatctcataggagaaaacgaatacctgcgaaatacgcttgataaagataacacagaaaacagcgacaaagcgttgctggaaatttacgagcgtctccgtcctggagagccgcctacagtagaaaatgcgaaaagcttgcttgattctcgtttctttgatccgaaacgatacgatcttgccaatgtaggacgctataaaattaataaaaaacttcatattaagaatcgcctcttcaatcagagacttgctgaaacgcttgttgatcctgaaacaggagaaatccttgctgaaaaaggccagattcttgatagaagaacgcttgataaagtactgccatacttagaaaacggaatcggttttagaaagctgtatccgaatggcggcgttgttgaagatgaagtgactcttcaatcaattaaaatctttgctccgactgatcaagaaggagaacaggttatcaatgtaatcggcaatgcttacatcgaagaagagattaaaaacatcacgcctgctgatattatttcttcaatcagctacttcttcaacctgctgcacggagtaggcgacacagatgatatcgatcatcttggaaaccgccgtttacgttctgtaggcgagcttctccagaaccaattccgtatcggtttaagccgtatggagcgtgtggttcgtgagagaatgtcaattcaagatacgaatacaattacgcctcagcagctgatcaatattcgtcctgttattgcgtccattaaagagttctttggaagctcacagctttctcaattcatggatcagacgaacccgcttgctgaattaacgcacaagcgtcgtctgtcagcattaggaccgggcggattgacacgtgagcgtgccggaatggaagtgcgtgacgttcactactcccactatggccgtatgtgtccgattgaaacgcctgagggcccgaacatcggtttgatcaactcactatcatcttatgcaaaagtaaaccgttttggctttattgaaacgccatatcgccgcgttgaccctgaaacagggaaggtaacgggcagaatcgattacttaactgctgatgaagaggataactatgttgtcgctcaagcgaatgctcgtcttgatgacgaaggcgcctttattgatgacagcatcgtagctcgtttccgcggggagaacaccgttgtttccagaaatcgtgtagactacatggatgtatcgcctaagcaggttgtatctgctgcgacagcatgtatcccgttcttagaaaacgatgactccaaccgtgccctcatgggagcgaacatgcagcgtcaggctgtgcctttgatgcagccggaagcgccatttgttggaactggtatggaatacgtatcaggaaaagactctggtgccgctgttatttgtaaacaccctggtatcgttgaacgcgtagaagccaaaaacgtttgggttcgccgttatgaagaagtagacggtcaaaaagtaaaaggaaacctggataaatacagcctgctgaaatttgtccgctctaaccaaggtacgtgctacaaccagcgtccgatcgtaagtgtcggcgatgaagtggtaaaaggagaaatccttgctgacggtccttctatggagcttggtgaacttgcacttggccgtaacgtaatggtcggcttcatgacgtgggatggctacaactatgaggatgccatcatcatgagtgaacgcctagtgaaggatgatgtttatacatctatccacattgaagaatacgaatcagaagcacgtgatacgaaacttggacctgaagaaatcactcgcgatattccaaacgtcggtgaagatgcgcttcgcaatcttgatgaccgcggaatcatccgtattggggcagaagtaaaagacggagatcttcttgttggtaaagtaacgcctaaaggcgtaactgaactgactgccgaagaacgccttcttcacgccatctttggcgagaaagcccgcgaggttcgtgatacttctcttcgtgtgcctcatggcggcggcggaattatccatgacgttaaagtcttcaaccgtgaagacggagacgaacttcctccaggtgttaaccagttagtacgcgtatatatcgttcagaaacgtaagatttctgaaggggataaaatggccggtcgtcacggtaacaaaggtgttatctctaagattcttcctgaagaggatatgccttaccttcctgacggcacaccaattgatatcatgcttaacccgctgggcgtaccatcacgtatgaacatcgggcaggtattggaacttcacatgggtatggccgctcgttaccttggcattcacattgcatctcctgtatttgacggagcgcgagaagaggatgtctgggaaacacttgaagaagccggcatgtctcgtgacgccaaaacagtgctttacgacggacgtactggagagccgtttgataaccgtgtatctgtcggtatcatgtacatgatcaaactggctcacatggttgacgataaacttcatgcacgctctacaggtccttactcacttgttacgcagcagcctcttggcggtaaagcgcaatttggcggacagcgttttggtgagatggaggtttgggcacttgaagcttacggtgcggcttatactcttcaagaaattctgactgttaagtctgatgacgtggttggacgtgtgaaaacatacgaagccatcgttaaaggcgacaatgttcctgaaccaggtgttccggaatcattcaaagtattaatcaaagaacttcaaagcttaggtatggatgtcaaaatcctttctggtgatgaagaagaaatagaaatgagagatttagaagacgaagaagatgcgaaacaagctgacggcctggcattatcaggtgatgaagagccggaagaaacagcatctgcagacgttgaacgcgatgtagtaacaaaagaataatctctagttataaaggcaagtgacatcggttaatccgaagataaaaagggaggtaggccccttgctagatgtgaacaattttgagtatatgaacatcggtcttgcttcaccagataaaatccgttcatggtcttttggtgaagtgaaaaagcctgaaacgataaactatcgtacgttaaaacctgaaaaggacggtctattctgcgaacgcattttcggaccgactaaggactgggaatgtcattgcgggaagtacaagcgagttcgttataaaggcgtagtttgtgaccgctgcggagtcgaagtaacacgggctaaagtccgtcgtgagagaatggggcacattgaactggctgccccagtttcccacatttggtatttcaaaggtattccaagccgtatgggtcttgtgctggatatgtcacctcgtgctttagaagaagtcatttactttgcttcttacgttgtaactgatccggcgaatacaccgcttgaaaagaaacagcttctgtctgagaaagaatatcgtgcttatcttgataaatacggtaataaattccaagcatctatgggtgctgaagcaattcataaacttcttcaagatattgatcttgtaaaagaagttgatatgttaaaagaagagctgaaaacttcacaaggacaacgccgtactcgtgcgatcaaacgtcttgaagttttagaagccttccgtaactcaggaaacaagccttcttggatgatccttgatgtgcttcctgttattcctccggagcttagaccgatggttcagctagatggcggtcgttttgcgacttctgatttgaatgacctttatcgtcgtgtcatcaaccgtaacaatcgtttgaaacgccttttggaccttggtgcgcctagcatcatcgttcaaaacgaaaagcgtatgcttcaagaggctgtcgatgccctaattgacaacggccgccgcggacgccctgtaacaggtcctggtaacagaccgttaaaatctctttctcacatgctgaaagggaagcaaggccgtttccgtcaaaaccttcttggtaaacgtgttgattactccggacgttctgtaatcgttgttggtcctcatttgaaaatgtaccaatgcggattaccgaaggaaatggcgcttgaacttttcaaacctttcgttatgaaagaacttgttgaaaaaggtcttgctcacaacattaagagtgcgaaacgcaaaattgagcgcgtacagcctgaagtttgggatgtactagaatcagttattaaggagcatccggtactgctgaaccgtgcccctacacttcacagattaggtatccaggcgtttgaaccaacgcttgttgaaggacgcgcaatccgtcttcacccgctcgtatgtacagcttacaacgctgactttgacggtgaccaaatggcggttcacgtaccattatctgctgaagcacaagctgaagcacgcatcttgatgcttgctgctcaaaacatcttgaaccctaaagatggtaaaccggttgtaacaccgtctcaggatatggtactaggtaactattacctgacacttgagcgtgccggtgctgtcggtgaaggtatggtcttcaagaatacagacgaagcgcttcttgcttatcaaaacggatatgttcaccttcatacgagagtagctgttgcagctaactcacttaagaatgtgacatttaccgaagaacagcgctcaaaattgttaattacaactgtcggtaagcttgtcttcaatgaaattcttccggaatcattcccttacatgaatgaaccaacgaagagcaacattgaagagaaaacaccagaccgtttcttcttagaaaaaggtgctgatgttaaagctgttatcgcacagcagccaatcaatgcgccgtttaaaaaaggcattctgggtaaaatcatcgcggaaatctttaaacgattccatattacggaaacgtctaaaatgcttgaccgcatgaaaaacctaggtttcaaatattcaactaaagctggtattacagttggggtttctgacatcgtcgtactcgatgataaacaagaaattcttgaggaagcgcaaagcaaagttgacaacgttatgaagcaattccgccgcggtcttatcactgaagaagaacgctatgagagagtcatctctatctggagtgctgcaaaagacgttatccaaggcaaactgatgaaatcacttgatgaactcaacccgatctacatgatgagtgactctggtgcccgtggtaacgcatctaactttacgcagcttgccggaatgcgcggcctgatggccaacccggctggacgtatcattgagttgccgatcaaatcaagtttccgtgaaggtctgacagtattggagtactttatctccacacacggtgcgcgtaaaggtcttgccgataccgctcttaaaactgctgactcaggttaccttacacgccgtctcgttgacgttgctcaggatgttatcatccgtgaaactgattgcggaactgaccgaggcattcttgctaagcctcttaaagaaggaactgaaacaattgagcgcttagaagaacgcttaatcggacgttttgcaagaaaacaagtgaagcaccctgaaacaggtgaagtgcttgtgaatgaaaacgaactgatcgatgaagataaagcactggagattgtcgaagccggcattgaagaagtgtggatccgttctgccttcacatgtaatacgcctcatggtgtatgtaaacgatgctatggccgaaatcttgcaactggctccgatgttgaagtcggtgaagctgtcggaatcattgctgcccaatcaatcggtgagcctggtacacagttaacaatgcgtacattccatacaggcggggttgccggagatgacatcacacagggtcttccgcgtatccaagagcttttcgaagcgcgtaatccgaaaggtcaggcaacaattacagaaatcgacggtacagtcgttgagatcaatgaagttcgtgataagcaacaggaaattgtggttcaaggcgcagtggaaacacgttcttatacggcaccttacaactcccgcctgaaagtagcggaaggagataaaattactcgaggccaagtactgacagaaggttcaatcgatccgaaagaacttcttaaagtgactgacctgacgactgttcaagagtatcttctccatgaggttcaaaaggtttaccgtatgcagggtgttgaaatcggtgataaacacgtagaagtaatggttcgccagatgcttcgtaaagtacgcgtgattgatgccggtgacactgatgtgcttccaggtacattgcttgatattcaccaatttactgaagcgaacaaaaaggtattgcttgaaggcaatcgacctgctacaggccgtcctgtcttactcggtattacaaaagcatctcttgaaactgattcattcttatctgctgcttccttccaggaaacaacacgtgtccttacagatgcagcgatcaaaggtaagcgtgacgagcttctcggcttgaaagagaatgttatcatcggtaagcttgttccagctggtacaggaatgatgaaataccgtaaagtaaaaccagtatcaaatgttcagccgactgacgatatggtcccggttgaataactgatttaactctgctgaaagactgcaaaaacagtctttcagcagatatatttatgaaaaagtcactctatgagaagaacgaatctaaaaaatgtcataccttgttgacattcgtctcctagaatgataatataaccaaggtgctcgaaataaacctgttactttggaggatatgtttatgtcttatgataaagtatcacaggccaaatcaattattattggtacgaagcaaacagtgaaagctctaaagcgaggttcagtaaaggaagtagtcgttgcaaaagacgcagatccgatactcacgtcaagtgttgtttcacttgctgaagatcaaggtatctctgtctcaatggttgaatccatgaaaaagctcggcaaagcctgcggaattgaggtaggagcagccgctgttgccattattttataacgtacttttgtttttgcgtaagattccatcttgtgtaaagacattgttttttgccttttgatgaaccacctgggtatgtgggttataaaacgtaatgaagggaggaaaaattcatgcctacaattaatcagctaattcgcaaaggacgcgtgagtaaagtagaaaactcaaagtctcctgcacttaacaaaggatacaacagctttaaaaaagagcacactaacgtatcttctccacaaaaacgcggggtatgtactcgtgttggtacaatgacaccgaaaaaaccgaactcagcacttcgtaaatatgctcgtgttcgtttgactaacggaatcgaggttactgcttacattcctggtatcggtcacaacctacaagagcacagtgttgtacttatccgcggcggacgtgtaaaagacttaccaggggtacgttaccacatcgttcgtggtgcgcttgatactgctggagttgaaaaccgtgcacaaggccgttctaaatacggtacgaaaaaacctaaagcaaaataatatacgaaaatacgcataattgatgaagggaggatattcagatgccacgtaaaggtcctgtagcaaaaagagatgttttacctgatccgatttacaactctaagcttgtatctcgtttaatcaacaaaatgatgatcgatggtaaaaaaggtaagtctcaaacaatcctatacaagtcattcgatatcattaaagaacgtactggcaatgatgcaatggaggttttcgaacaagcattgaaaaacatcatgcctgtacttgaagtaaaagcacgccgtgtaggtggtgcgaactaccaagttcctgtagaagttcgtcctgaacgtcgtacgactcttggacttcgctggttagttaactacgctcgtcttcgcggagaaaaaacgatggaagagcgtttagctaacgaaatccttgacgcagctaacaacactggtgctgctgttaagaaacgtgaagacactcataagatggctgaagcaaacaaagcatttgctcactatcgctggtaggatttatagattaacaaaacacaatttcctaataaggaaggagaaattacccaatggcaagagagttctccttagaaaaaactcgtaatatcggtatcatggctcacatcgatgccggtaaaacgactactacagaacgtatcttgttctatactggtcgtatccacaaaattggtgaaactcatgaaggagcttcacaaatggactggatggagcaggaacaagaacgtggtatcacaatcacttccgctgcgacaactgcacagtggaaaggataccgcgtaaacatcatcgatactccaggacacgtagacttcacagttgaagttgaacgttctcttcgtgtacttgatggtgctgttgctgtacttgacgcgcaatcaggcgttgagcctcaaacagaaactgtttggcgtcaggcaacaacttatggagtaccgcgtatcgtttttgttaacaaaatggacaaaatcggtgcagacttcctttactctgtaggaactttaagagaccgtcttcaagcaaacgctcatgcaattcaattgccgatcggtgctgaagataacttcgaaggtatcattgaccttgtagaaaacgttgcgtatttctacgaagatgacctcggaactcgttctgatgcaaaagaaatccctgaagagtacaaagagcaagccgaagagcttcgcaacagccttattgaagctgtatgtgagcttgatgaagagcttatggataagtaccttgagggtgaagaaatcacaattgacgagttaaaagcaggaattcgtaaaggtacattaaatgttgaattctaccctgttcttgttggttctgccttcaaaaacaaaggtgttcaactagtacttgatgctgttcttgactaccttcctgcaccaactgacgttgctgcaatcaaaggtacacgtcctgatacaaatgaagagattgagcgtcattcttctgacgaagagccattctctgcattagcatttaaagttatgactgacccttacgttggtaagttgacgttcttccgtgtgtactctggaacacttgattctggttcatacgtgaaaaactctactaaaggcaaacgtgagcgtgttggacgtattcttcaaatgcacgctaacagccgtgaagaaatctctactgtatacgcaggggatatcgcagctgctgtaggtctaaaagatacaactactggagatactctatgtgatgagaaggatcttgttatccttgagtcaatggaattcccagaaccagttatcgacgttgctattgagcctaaatcaaaagctgaccaagataaaatgggtatcgctttagcgaaacttgctgaagaagatcctacattccgtactcaaacaaacccagaaactggccaaacgatcatctctggtatgggtgaacttcaccttgatatcattgttgaccgtatgaaacgcgaatttaaagtagaagccaatgttggtgctcctcaagttgcgtaccgtgaaacattccgtaccggtgctaaagttgaaggtaaattcgtacgtcagtctggtggacgcggtcagttcggacacgtttggatcgaattcgaaccaaacgaagaaggcgctggctttgaatttgaaaatgcgattgtcggtggggttgttcctcgtgaatacatcccagctgttcaagcaggtctggaagatgcacttgaaaatggtgtactagcaggcttcccgcttatcgacattaaagctaaacttttcgacggttcttaccatgatgttgactcaaacgaaatggcatttaaagttgctgcttctatggcattgaaaaatgcagtcagcaaatgtaacccagttcttcttgaaccaatcatgaaagtagaagtggttattccagaagaatacatgggagatatcatgggtgatattacttcacgtcgcggacgcgtagaaggtatggaagcacgcggtaacgctcaagttgttcgcgctatggttcctcttgctgaaatgttcggttacgctactgcacttcgttctaatacgcaaggtcgcggtacgttcactatgcacatggatcactacgaagaagtgccgaagagcgtcgcagaagaaattatcaaaaaaaataaaggcgaataattgattttgccgcttaactcaagtataactactattgtaagatgaggaagtgaaagctttctttcacttcctatcactctatacattactaattaaaagctcttaaggaggattttagaatggctaaagaaaaattcgaccgttccaaatcacatgccaatattggtacaattggacacgttgaccatggtaaaacaactttaactgctgctatcacaacagtacttcataagaaatctggtaaaggtacagctatggcgtacgatcaaattgatggtgctccagaagaacgcgagcgcggtatcacaatctctactgcacacgttgagtacgaaactgaaactcgtcactatgcacacgttgactgcccaggacacgctgactatgttaaaaacatgatcactggtgctgcgcaaatggacggagctatccttgtagtatctgctgctgatggcccaatgccacaaactcgtgagcacatccttctttctaaaaacgttggtgtaccatacatcgttgtattcttaaacaaatgcgacatggtagacgacgaagagcttcttgaactagttgaaatggaagttcgcgatcttcttagcgaatacgacttccctggtgatgatgtaccagttgttaaaggttctgctcttaaagctcttgaaggagacgctgagtgggaagctaaaatcttcgaacttatggatgcggttgatgagtacatcccaactccagaacgcgacactgaaaaaccattcatgatgccagttgaggacgtattctcaatcactggtcgtggtacagttgctactggccgtgtagaacgcggacaagttaaagtcggtgacgaagttgaaatcatcggtcttcaagaagagaacaagaaaacaactgttacaggtgttgaaatgttccgtaagcttcttgattacgctgaagctggtgacaacattggtgcccttcttcgcggtgtatctcgtgaagaaatccaacgtggtcaagtacttgctaaaccaggtacaatcactccacacagcaaattcaaagctgaagtttacgttctttctaaagaagagggtggacgtcatactccattcttctctaactaccgtcctcagttctacttccgtacaactgacgtaactggtatcatccatcttccagaaggcgtagaaatggttatgcctggagataacactgaaatgaacgttgaacttatttctacaatcgctatcgaagaaggaactcgtttctctattcgtgaaggcggacgtactgttggttcaggcgttgtttctacaatcactgagtaatagtatgattttaaacgagacccctgcgggtctcgttttttgtttgcttatctttttcttgtataataggatctatcatattcgaggggttaatatttatgattcctgaaaagaaatcaatcgcaatcatgaaagaactaagcattggaaatacaaagcaaatgctgatgattaatggagttgacgtggaaaatccattgttgctttttttacatggcgggccgggaacgccgcaaatcggatatgttagacattatcaaaaagagctggaactgtattttacagtagttcattgggatcagagaggatcggggctttcttattctaagcgaatttcgcatcactctatgacaataaatcacttcattaaagatacaatccaagtcactcaatggcttttagctcatttttcaaaatcaaaactttacctagccggtcattcttgggggtcaatactggcgcttcatgttttgcagcagtgtcctgatttattttacgcgtattatggaatcagccaggttgttaaccctcatgatgaagaatcaactgcttatcaacatattcgtgaaatttctgaatcaaaaaatgccagcttattatctttcctcacacgtttcattggtgctccgccttggaagcaggatatccagcaccttatctatcggttttgtgtcgagctaagcaggggaggcttcactcgccgtcatcgtcaatctctagctgtattatttcaaatgcttactggcaatgagtatggagtgcggaacatgcacagcttcctcaatggattgcgcttcagtaaaaaacatttaactggtgagttgtaccggtttaatgcttttacatcagttccttctattaaagtaccgtgtgttttcatttcagggaaacatgacttaattgttcctgctgaaatatcgaaacagtattatcaagagcttgaggcacccgaaaagcgctggtttcaatttgagaactcagctcacaccccgcatattgaggagccggcattattcgcgaacacattaagtcgacatgcacgacaccatttatgatagatccttgataaataagaaaaacccctgtataataaaaaaagtgtgcaaaccatgcatattttaaataagtcttgcaacatgcgcctattttctgtataatggtgtatgttggtctttgactgcgatgaagtgagaggttgctgacacacccggccgctttgccatggcaaggtgttcaggtttttctcacggagaactgtctaacgtgatgtaggcgaaaaggagggaaaataatggcaaaacaaaaaattcgtattcgtttgaaagcatatgatcatagaatccttgatcaatctgcagagaagattgttgaaacggcaaaacgttctggtgccagcgtatctggtccgattccgttgccaactgaaaaatcagtttacacaatccttcgtgcggtgcacaaatacaaagattctcgtgagcaatttgaaatgcgtacacataaacgtttaatcgacattgtgaacccaacaccacaaactgttgatgctcttatgcgattagacttaccatctggtgtcgatatcgaaattaaactttaattctaaaatatagaatgatcttaataggaggtgtgacgaatgaccaaaggaatcttaggaagaaaaattggtatgacgcaagtattcgctgagaatggtgatcttattccggtaactgttatcgaggctgctccaaacgttgttcttcaaaagaaaacagctgaaaacgacggttacgaagcaatccagcttggttttgacgacaagcgtgaaaagctttctaacaaacctgaaaaagggcacgttgcaaaagcggaaactgctcctaagcgcttcgttaaagaattacgcggagtggaaatggatgcgtatgaagttggtcaggaagtcaaggttgaaattttctctgctggagaaatcgtagatgtaacaggagtatctaaaggtaaaggtttccaaggtgcgatcaagcgccacggacaatctcgcggacctatgtctcacggttcacgctaccaccgtcgtcctggttcaatgggacctgtagatcctaaccgtgtattcaaaggtaaattattacctggacgtatgggcggagagcaaatcactgttcaaaaccttgaaatcgtaaaagttgatgcagaacgcaatcttcttttgatcaaaggtaacgtacctggtgcgaagaaatctttaatcactgttaaaagtgctgttaaatctaaataattctcttaggaaaggaggaaattgattatgccaaaagtagcattatacaaccaaaacggttctactgctggtgacatcgaattaaacgcttctgtatttggtatcgaaccaaatgagagtgttgtattcgacgctattcttatgcaaagagcttccttacgtcaaggaactcacaaagtaaaaaatcgttctgaagtacgcggcggaggtcgtaaaccatggcgtcaaaaaggtactggacgtgcccgtcaaggttcaatccgttcaccgcaatggcgcggaggtggtgtcgtattcggcccaacaccacgcagctattcttataaattacctaaaaaagttcgccgcttggcaatcaaatcagtattgtcttctaaagtgatcgacaacaacatcatcgttcttgaagatcttactcttgatacggctaaaacaaaagaaatggcagctatccttaaaggattatctgttgagaaaaaagctttaatcgtaactgcggatgcaaacgaagcagtagctttatctgctcgtaacattcctggagttactgttgttgaagctaacggaatcaacgttttagacgttgtcaaccacgagaagcttctgattacaaaagcagcggttgaaaaagtagaggaggtgcttgcataatgaaagatcctcgtgatgttctaaagcgccccgtcattactgaacgttctgctgatttaatgactgaaaagaaatatacttttgaagttgatgtaagagctaacaaaacagaagtgaaagacgcggttgaaagcatctttggagtgaaagttgacaaagtcaacatcatgaactacaaaggtaaatcaaaacgtgttggacgctacactggtatgactagccgtcgcagaaaagcgatcgtaaaacttactgcagacagcaaagaaatcgaaatttttgaagcttaattatctgtaaaaagaaggagggaaattcaaaatggcgattaaaaagtataaaccgacctctaatggacgtcgtggcatgacaacttcagattttgctgaaatcacgactgacaagccggaaaaatccttgcttgctccccttcacaaaaaaggcggacgtaacaaccaaggtaaattgactgtacgtcaccaaggtggcggacataaacgccaataccgtgttatcgacttcaaacgcgataaagatggtatacctggacgcgttgctacagttgaatacgatccaaaccgttcagctaacatcgctctaatcaactatgcagacggagaaaaacgttacattcttgctcctaaaggaattcaagtaggtactgaaatcatgtcaggtcctgaagctgacattaaagtaggtaatgcacttccacttatcaacatccctgttggtacagttgtgcataacattgaattaaaacctggtaaaggcggacagcttgtacgttcagctggtacatctgctcaggttcttggtaaagaaggtaaatacgttcttgtacgtcttaactctggtgaagttcgcatgatcctttctgcttgccgtgcttctatcggtcaagtaggtaacgaacagcacgaacttatcaacattggtaaagctggacgttctcgctggaaaggcatccgtcctacagttcgtggttctgtaatgaaccctaacgatcacccacacggtggtggtgaaggacgtgcgccaatcggacgtaaatcaccaatgtctccatggggcaaacctactcttggattcaagactcgtaagaaaaagaacaaatccgataaatttatcgtacgtcgtcgtaaaaataaataacggggttgtctacggttcttttcggaccgtagtgcaatcacgaagggaggttccaaaatggctcgcagcttaaaaaaaggaccatttgtcgatggacacttgatgactaaaatcgagaaattaaatgaaacagacaagaaacaagtcgtaaaaacttggtctcgtcgttctactattttcccacagtttattggtcacacaatcgcagtctatgacggacgtaaacacgtgcctgtattcatctctgaagatatggtagggcacaagttgggtgaattcgctccaactcgtacgtacaaaggtcatgctagtgatgacaaaaaaacaagacgctaagagaggaggcttttaaatgcaagctaaagctgttgcaagaacagtccgtattgctcctcgtaaagcacgtctagtaatggacctgattcgaggcaagcaagtaggtgaggcagtatcaatcttgaaccttacaccaagagctgcttctccaattatcgagaaagtattaaaatccgctattgcaaatgctgagcataactatgaaatggacgctaacaacctggttatttctcaagcattcgttgacgaaggccctacgttaaaaagattccgcccacgtgctatgggacgtgcgagccaaatcaacaaacgtacgagccacattacaatcgttgtatcagaaaagaaggagggataagtagtgggtcaaaaggtaaatccagtcggtcttcgtatcggagtcattcgtgattgggaatctaagtggtacgctggtaaagattacgctgacttcctgcacgaagatttaaaaattcgtgaatacattagcaaacgcctttctgacgcttctgtttctaaagtagaaatcgagcgtgcagcaaaccgcgttaacattacgatccacacagctaagcctggtatggttatcggtaaaggcggttctgaagtcgaagcacttcgcaaagcccttaacagccttactggcaagcgtgtacacattaacattcttgaaatcaaaagagcagatcttgatgcacagctagttgctgacaacatcgctcgtcaattagaaaaccgtgtttctttccgccgtgcgcagaaacaacaaatccaacgtactatgcgtgctggagcacaaggtgtgaaaacaatggtttctggtcgtcttggcggtgcagatatcgctcgttctgaatactacagtgaaggaactgttccattgcacacattacgtgcggacattgactatgcaacatctgaagctgatactacttacggtaagcttggtgtaaaagtctggatctatcgtggagaggttcttcctactaagaagaaaactgaggaaggaggaaaataatatgttattaccaaaacgcgttaaatatcgcagagagcatcgcggaaaaatgcgtggccgtgcgaaaggcggtactgaagtacatttcggagaattcggtatccaagctcttgaagcttcttggattactaaccgtcaaatcgaagctgcacgtattgcgatgactcgttacatgaaacgtggcggtaaagtttggatcaaaattttcccttctaaaccttacactgctaaaccacttgaggtacgtatgggatccggtaaaggggctccagaaggttgggtagctgttgtaaaaccgggcaaagttttatttgaaatttctggtgtgtctgaagaggttgctcgtgaagcgcttcgccttgcatctcacaaattgccaattaaaacgaagttcgtaaaacgtgaagaaattggtggtgaatcaaatgaaagctaatgaaattcgtgaccttaccactgctgaaattgaacaaaaagtaaagtctcttaaagaagaacttttcaatcttcgctttcaattagcgacaggacaacttgaaaatactgctcgcattcgtgaagtgcgcaaagctatcgcgcgcatgaaaactgtgattcgtgaaagagaaattgctgctaataaataatcactgaggggaggtcgtgagcatgagcgaacgtaaccaacgcaaagtttaccaaggccgtgttgtttctgacaaaatggataaaaccattactgttgttgttgagacatacaaaaaacatacactttacggtaaacgcgtaaaatactcaaaaaaattcaaagcacatgatgaaaataatcaagctaaaatcggtgacatcgttaagatcatggaaactcgtccattgtctgcaactaagcgtttccgtctagttgaagttgtcgaagaagctgttattatctaataaagttcggaattctttttccgaagggaggtaacaaataatgattcaacaagagactcgtttaaaagtagctgacaactctggcgcacgtgaagtacttactattaaagttcttggtggttctggacgtaaaacagctaacattggtgatgtaattgtttgcacggttaaacaagcaacaccaggaggcgttgtcaaaaaaggtgaagtcgtaaaagctgttatcgttcgcactaaaagcggagcgcgcagaagtgacggttcatacatcagcttcgatgagaatgcatgtgttatcatccgtgacgacaagagcccacgcggaactcgtatcttcggaccagttgctcgtgaattgcgtgaaaacaactttatgaaaattgtttctctagctccagaagttatctaatgaaataaatgccttactcaaggaggtgcgatcaggatgcatgtaaaaaaaggcgataaagttatggttatctctggtaaagataaaggcaaacaaggaacaatccttgctgctttccctaaaaaggaccgcgttttagttgaaggtgttaacatggtaaagaaacactctaaaccaactcaagctaaccctcaaggcggtatttctaatcaagaggcgccaattcatgtatcaaacgttatgccgctcgatcctaaaacaggtgaagtgactcgcgtaggatacaaagtggaagatggcaaaaaagttcgtgtagcaaaaaaatctgggcaagttctagataaatagtattaaaaggaagggaggtctatctcatgaaccgccttaaagaaaagtacaataaagaaattgcacctgctttaatgactaagttcaattatgattcagtcatgcaagtgcctaaaatcgaaaaaatcgtaatcaacatgggtgttggtgacgctgttcaaaacgccaaagcaatcgacagtgctgttgaagaattaacgtttatcgcaggtcaaaaacctgtcgttactcgtgcgaagaaatcaattgctggattccgtcttcgtgagggaatgcctatcggtgcgaaagtaactcttcgcggagagcgcatgtatgatttccttgataaacttatttctgtatctttaccgcgtgtacgtgacttccgcggggtttctaaaaaatctttcgacggtcgcggtaactacacacttggtatcaaagaacagttaatcttccctgaaattgactacgataaagtaacaaaggttcgcggaatggacatcgttatcgtaacaactgctaatactgacgaagaagctcgtgagctattaactcaagtaggtatgccgttccagaaataatcaatgaaagggaggcgaaatcgtggctaaaaagtctatgattgcgaaacaacaacgtacaccaaagtttaaagtacaagagtacacacgctgtgaacgctgcggacgtccgcattcagtcattcgtaaatttaaactttgccgtatttgtttccgtgagcttgcatataaaggacaaattcctggcgtgaaaaaagccagctggtaatccccaagaaagggaaggaggtaattatataatggttatgacagatccaattgcagatatgctaactcgtattcgcaatgcaaacatggtacgtcatgagaagcttgaaattcctgcttctaaattgaaaagagaaattgctgaaattttaaagcgtgaaggtttcattcgtgacgttgagttcgtagaagacagcaaacaaggtatcatccgcgttttcttgaaatacggacaaaacaacgagcgcgttatcactggtcttaaaagaatcagcaagcctggtttgcgtgtttatgctaaatctaatgaagtaccccgcgtacttaacggtcttggaatcgcgattatttctacatcacaaggtgttttaacggacaaagaagcccgtgcaaaacaagctggtggagaagttctagcatacgtttggtaagaagtttaacatgaatggaggtgtttggtatgtctcgtgtaggtaagaagctacttgagattccttctgatgttacagtaacgttaaatgataacaacactgtagctgtgaaaggaccaaaaggagaattaactcgtacgtttcaccctgatatggagattaaagtagaggacaatgtgcttacagtcgctcgtccttctgatcaaaaagagcaccgtgccctgcatggtacgactcgcagtctgcttggcaacatggttgaaggtgtatctaaaggatttgaaagaggtttggaattagtcggtgtcggttaccgtgcttctaaatccggaaataaacttgttttaaacgttggatactctcatcctgttgagatcgttcctgaagaaggcatcgaaatcgaagttccttctcaaacaaaagtagttgtaaaaggtacagacaaagaacgcgtaggagctattgctgctaacatccgcgctgtacgttctccagagccttacaaaggtaaaggaatccgctacgaaggtgaagttgttcgccgtaaagaaggtaaatctgctaagtaagatcgcttaaagtgaagaaaggagtgacctagatgattacgaaaactagcaaaaatgctgctcgtcttaaaagacacgctcgtgttcgcgctaaactttccggtactgctgaaagaccgcgcctgaacgttttccgttctaacaagcacatttacgctcaaatcatcgatgatgtaaatggtgtaacacttgctagtgcatctactctcgataaagacttgaacgttgaaagcactggagatacttctgctgctactaaagttggagaattagttgcaaaacgcgctgctgaaaaaggcatttctgacgtagtatttgaccgtggcggatacttataccatggacgtgtaaaagctttggctgatgccgctcgtgaagctggacttaaattttaataaaagaaggagggacacatgattatgcgtcgtattgacccaagcaaattagagttagaagaacgcttagttacggttaaccgcgtagcgaaagttgttaaaggtggtcgtcgtttccgcttcgcagctctagtcgttgtcggtgacaaaaacggacacgtaggattcggtactggtaaagcacaagaagtaccagaagcgatccgcaaagctgttgaagatgcgaaaaagaatttgattgaagtaccaatggttggaactacaattccacacgaaatcatcggacgtttcggtgcaggtaacatcttgttaaaacctgcttctgaaggtactggagttatcgctggaggccctgtacgtgcggtacttgagctagctggtgtagctgatatcctttctaagtctttaggttctaacacaccgatcaacatgattcgtgcaacacttcaaggtttaagtgagcttaaacgtgctgaagacgttgcgaagcttcgtggaaaatctgtagaagaactgttaggataaggagggaacattaatggctaaattagaaattaccctcaaacgaagtgtaatcggtcgcccggaagaccaacgcgttactgtaagaacacttggtttaaagaaaacaaaccaaactgttgttcatgaagacaacgctgcgatccgtggtatgattaataaagtatctcatttagtttctgttaaagaacaataaaaatatttgatcggataaggaggtgtcctaatgaaacttcatgaattaaaaccttcagaaggttcacgtaaaacgcgtaatcgcgtaggtcgtggtattggttctggcaacggtaaaacagctggtaaaggtcacaaaggtcaaaacgctcgttctggcggcggtgtacgccctggattcgaggggggacaaatgcctttattccaacgtcttcctaaacgcggtttcactaacatcaaccgcaaggaatacgctgtagtcaacctagacaaattgaacggttttgcagaaggaacggaagtcactcctgaacttcttctagagactggtgttattagcaaacttaatgcaggagtaaagattcttggcaacggtaaattagagaaaaaattaactgtaaaagccaataaattctctgcttctgcgaaagaagctgttgaagctgctggcggtacagctgaggtgatctaacttgtttaaaacaatctccaactttatgcgtgtgagtgatatcaggaataaaatcatattcactttactcatgcttatcgtctttcgcataggtgcgtttattcctgtgccttacgttaacgctgaagcgttacaggcacagtctcaaatgggtgtttttgatctccttaatacatttggcggcggtgcgctttaccaattttccattttcgcaatgggaattactccttatatcacggcttcgatcatcattcagctgcttcagatggatgtggtaccgaagtttaccgagtggtctaagcaaggtgaagttggccgccgtaaattagctcagttcacaaggtactttacgattgtgcttggtttcatccaagcgttaggtatgtcatatggattcaacaatctggcaaacggtatgctgatcgaaaaatccggtgtatcgacatatcttatcattgctttagtgctcactggcggaactgcctttttaatgtggcttggggaacaaattacttctcatggagtaggcaacggaatatcgatcattatcttcgcggggattgtgtctagtattccaaaaacaattgggcaaatatatgagactcaatttgtcggcagcaacgatcagttgtttattcatattgtgaaagtcgcacttcttgtgattgcgattttagcagttattgttggagttattttcattcagcaagccgtacggaaaattgcgattcaatatgctaaaggcacaggtcgttcacctgctggcggaggtcagtctacacaccttccattgaaagtgaatcctgcaggggttattccggtaatctttgcggttgcgtttttgataacgccgcggacgatcgcgtcattctttggaacaaacgatgtgacaaagtggattcaaaacaactttgataatacgcatccggtgggtatggcgatatatgttgcgttgattattgcctttacgtacttttatgcttttgtacaggtaaaccctgaacaaatggctgataaccttaaaaaacagggtggctatatcccgggggttcgtccagggaaaatgactcaagatagaattacgagcattttgtatcgacttacgtttgtgggttctatattcttagccgtgatttccattcttcctatctttttcattcaattcgctggattgcctcaaagtgcacaaattggcggaacatctttgttaattgttgtcggggtagccttggagacaatgaaacaactagaaagccagttggtgaaacgaaactaccgtggatttatgaaaaactagaggaaatggatttatccattccctcttaataaagagaggacgggggaaatccgaatgaacttagtcttaatggggcttcctggtgccggtaaaggcacacagggcgaacgaattgttgaggattatgggattcctcatatctcaacaggagatatgttccgtgctgctatgaaagaagaaacaccactcggactcgaagcaaaatcttatattgataagggagagctcgtacctgacgaagtcacaatcggaattgtaaaagagagacttggcaaagatgattgtgaaagaggttttcttctggacggatttccgcgaacagtcgctcaagccgaagctcttgaagaaattcttgaggaatacggcaagccgattgattatgtcattaacattgaagtcgacaaagatgttctgatggaacgtctgactggacgcagaatttgcagtgtttgcggcacaacctatcatttagtctttaatccgccgaaaacgccgggtatttgtgataaagacggaggcgaactctatcaacgggcagatgataatgaggaaacagtctctaaacggcttgaggtaaacatgaagcaaactcagcctttactcgatttctattcagagaaaggttatcttgcaaacgtgaatggccagcaggacattcaagacgtttatgcagatgtgaaggatcttcttggaggattaaaaaaatgattatctgtaaaaccccacgtgaacttggtatcatgcgggaagcagggcgaatcgtggctttaactcatgaagagttaaaaaagcacattaaaccaggaatctcgacaaaagaattggatcaaattgccgaacgttttattaagaagcagggtgcaatcccatcttttaaggggtataatgggtttcgcgggagcatttgcgtatcagttaatgaagaactcgttcacggcatacctggcagcagggtgctgaaggacggtgacatcatcagtattgatatcggtgctaaattaaatggttatcatggtgactctgcatggacatatccggtaggaaacatcagcgatgatgacaaaaaacttctggaagtgacagaggagtctttatataaaggcttgcaggaagcaaaaccaggtgaacgtttgtcgaatatttcccacgcaatacaaacgtatgtcgaaaatgagcagttttcagttgttagggagtatgtcggacatggtgttggtcaagacttgcatgaggacccgcaaattcctcattacggtccgcccaacaaaggaccacggcttaaacctggcatggttctcgctattgaacctatggtgaacgctggcagccgctacgtgaaaacattggctgataactggacggttgtaacggtagatgggaaaaagtgtgctcattttgaacatacgattgcgattacggaaacgggttttgatatactgacgagagtctagatgatgaaaataattccgaagacagatgtttttcaagcttgatagggcagaaagcttgggtgaacattggcaagaccgaattcatcttgctgcttgtcgttggaattttaaccatcatcaatgtactaacagcagacggagaaaagcgtacatttcattctcctaagaaaaagaatatcaatcatttaaccctttatgattgcgtatctccggaagttcagaacagtataaacgaaacagggcgtgtgacaaacttcttttgaaatttgtcagaaagcaagttactgatttgaagaagggagaacacttgaatggcgaaagacgatgtaattgaagtggaaggtactatagtcgaaacactgccaaacgcgatgttcaaagttgaacttgaaaatggccacactgttttggctcatgtatctggtaaaatccgcatgcacttcattcgcattttacctggagacaaagttacggtagaattatctccatatgacttaactcgtggcaggattacgtaccgttacaaataaagcactccggaaactgaaggaggttggaaacacatgaaagtgagaccatcagttaaaccaatctgcgaaaaatgtaaagttattcgcagaaaaggaaaagtaatggtgatctgtgaaaatccaaagcataaacaaaaacaaggataatttataaggaggtgcccagagaatggctcgtattgctggtgtagatatcccacgtgacaaacgtgttgttatttctttaacatacatcttcggaattggccgcacaacggctcagcaagttttaaaagaagctggagtttcagaagatactcgtgtgcgcgatcttactgaagaagaacttggtaaaatccgtgatattattgacaaactgaaagtagaaggtgaccttcgccgtgaagtttctcttaatatcaaacgtctgatcgaaatcggaagctaccgcggaatccgtcatcgcagaggattacctgttcgcggacaaaactctaaaaacaacgcgcgtactcgtaaaggtccgcgtcgtactgtagctaacaagaaaaaataagtaagggaggttcttaaacaatggctgctgctcgtaaatctaacacgcgtaaacgtcgcgtgaaaaagaatattgagtctggaattgctcatattcgttcaactttcaataacacgatcgttacgatcactgacactcatggtaatgctatttcttggtctagtgccggagctttaggattcagaggttctcgtaaatctactccttttgctgcgcaaatggctgcagaaacagctgctaaaggttcaatcgaacatggtcttaaaactctagaggttactgttaaaggacctggttcaggccgtgaagctgcaatccgtgcacttcaagctgctggactagaagtcactgctatcagagacgtaactcctgttcctcataacggatgccgtccaccaaaacgtcgccgcgtgtaatttgtttgtatagattttgtgtccctgtcaataatgggttatgatacagttatttatgaaacgaatgcaccgactcgttgcctgagcacatacgggactaaacaatggggaatttcggatggaatctcatatgattctattcgaggtttcgacgttttgaaggagggttttaagtaatgatcgagattgaaaaaccaaaaatcgaaacggttgaaatcagcgacgatgccaaatttggtaagtttgtcgtagagccacttgagcgtggatatggtacaactctgggtaactccttacgtcgtatcctcttatcctcactccctggtgccgctgtaacatcaatccagatagatggtgtactgcacgaattctcgacaattgaaggcgttgtggaagatgttacaacgattatcttacacattaaaaagcttgcattgaaaatctactctgatgaagagaagacgctagaaattgatgtacagggtgaaggaactgtaacggcagctgatattacacacgatagtgatgtagagatcttaaatcctgatcttcatatcgcgactcttggtgagaatgcgagtttccgagttcgccttactgctcaaagaggacgtgggtatacgcctgctgacgcaaacaagagagacgatcagccaatcggcgtgattccgatcgattctatctatacgccagtttctcgtgtatcttatcaggtagagaacactcgtgtaggccaagttgcaaactatgataaacttacacttgatgtttggactgatggaagcactggaccgaaagaagcaattgcgcttggttcaaagattttaactgaacaccttaatatattcgttggtttaactgacgaagctcaacatgctgaaatcatggttgaaaaagaagaagatcaaaaagagaaagttcttgaaatgacaattgaagaattggatctttctgttcgttcttacaactgcttaaagcgtgcgggtattaacacggttcaagagcttgcgaacaagacggaagaagatatgatgaaagttcgaaatctaggacgcaaatcacttgaagaagtgaaagcgaaactagaagaacttggactcggacttcgcaaagacgattgactagtttcccttgtgaactaggattttcgtgtgtttattattcagaaacagcattccaataaaggaggggacatcacatgtcatacagaaaactaggacgtacgagtgcacagcgtaaagctatgcttcgtgatcttacaactgatttgatcatcaacgaaagaatcgaaacaactgaaacacgtgcgaaagaacttcgctctgtagttgaaaaaatgatcacgcttggcaaacgcggtgatcttcacgctcgccgtcaagctgctgcatacatccgcaacgaggttgcaaacgaagaaaataaccaagatgcacttcaaaaattattctctgacattgcaactcgttacgaggagcgccaaggcggatacacacgtattatgaagcttggtcctcgccgtggtgacggagcaccaatggcaattatcgaattggtttaatcacatatttttgtgtatctaaagaagggcgggacagtttctaactggatctatgccctttttttagatactgcaacttttaatagagagaaaagcagagcattagctgagaggaggccggttttccatgaatcaaaatcagttgatatcggtagaggatatcgtatttcgatatcggaaggacgcagaaagacgagcactagacggcgtctccctgcaggtgtatgagggtgaatggcttgcaatcgtaggtcataacggttcagggaaatcaacactggcccgggcattgaatggtttaattcttcctgaatcaggcgacattgaggttgccgggattcaattgacagaggaatctgtttgggaagtgcgtaagaagataggtatggtctttcaaaatccggataaccaatttgtcggaacgactgttcgcgatgatgtggcttttggtttagaaaacaatggtgtaccgcgggaagaaatgattgagagagtagactgggcagtaaaacaggtgaatatgcaagattttctcgatcaagagccgcaccatctctccggaggccaaaagcagagagttgcgattgcgggggttattgccgcacgtcctgatattattatcttagatgaagcaacatccatgcttgatccgatcgggcgagaagaagtgcttgaaacggtaagacatttaaaagagcagggcatggcgactgtcatatccattacacatgatctgaatgaggcagcaaaagcagacaggatcattgtcatgaatggcggtaaaaaatatgctgaagggccgcctgaagagatttttaaattgaataaagaacttgttcgaattgggcttgatttacccttctcattccagcttagccagcttttaagagaaaatggactggctttggaagaaaaccatttgactcaggaagggctggtgaaagagctgtggacattacaatcaaagatgtagagcatcgctatcagatgaagacgccgtttgagcgcctagcactgtatgatatcaatgcatcgattaaagaaggaagctacgtagccgttatcgggcatacaggctctggcaagtccactcttcttcagcacctaaatggtctcctgaagccgacgaagggacagatatcactaggcagcactgtcattcaggcagggaaaaagaataaagatctgaaaaaacttcgtaaaaaagtcggaatcgttttccaatttcctgagcatcaattattcgaagaaacagttcttaaagatatttcattcggaccgatgaactttggtgttaaaaaagaagatgctgaacaaaaagcgagagagatgctgcagcttgtaggtttatcagaagagcttttggacaggtcaccctttgaattaagcgggggacaaatgcgcagagttgcaattgccggcgtacttgcaatggaccctgaagtgcttgttctcgatgaaccgactgcaggattggacccaagagggcgaaaagagattatggacatgttttatgagcttcatcaacgtgggaacctgacgacgatccttgtgacacacagcatggaggatgcagctgcatacgctgatgaaatgattgttatgcataaaggaatgatacaagcatcaggcagtccgcgtgatctgtttttaaagggtgaagagatggccggctgggggctggatcttcctgaaacaataaaattccaaagacaccttgaagctgtactgggtgtgagatttaatgagcctatgctcacaatcgaagatgccgctgccaaaatccgtgctctttttcagggggagaagactttatgatggacagcatgattatcggcaagtatgtaccgggtacttcacttgtgcaccggcttgaccccagaacaaaactgatcacgatctttttatttgtctgcatcgtattcttagccaataatgttcagacatatgcgttgcttggtttatttacaattggcgtcgtttctttaacaagagttcctttctcttttttaatgaaagggctgaagccaatcatctggattgtcctttttacgttccttcttcacatccttatgacacatgaaggaccgattatctttcaaataggttttttcaaagtctatgagggcggtctggttcaggggatattcatttctcttagattcgtctatttgattttaatcacaaccttattaacgcttacgaccacaccgattgagattaccgatggaatggaacagctgctgaacccattgaaaaaattaaagcttcctgttcatgagctggctcttatgatgtcaatttctttacggtttattccgacactgatggaggagacagataagatcatgaaggctcagatggcgcgaggcgttgattttacaagcgggcctgtcaaagatagagtgaaggctattgtcccgcttcttgtcccgctcttcgtcagcgcatttaaacgcgccgaagagcttgcggtggcaatggaagcaagaggctatcaaggcggagaaggacgtacgaaatatagaaagcttgtatggacaggaaaagacacttctgtcattgtcagcttaattgtattagctgctttgttatttttcttaagggcttagaggtgctgtatgagactgaaatgcacgatttcttatgacggacatttgtttaacggttatcaggttcagccgggcaaaagaacggttcaggatgaactggagaaggctttggctgtcctgcataagtcaaaagacagaattccggttgtttcgtctggaagaacagacagcggggttcacgcagccggacaggtgattcattttgacactccgctgtctatcccggctgagagatggccatatgccttaaatgcactgcttccggacgatatcgcagtcaaacaggcagaaattgcggatgatgggttccatgcacgatttagcgcagtcaaaaaagaatatcgctactttgtatacacggagaaacacccggacgtatttaaacggcattacgcttaccatttttcatatcgccttaatgtgcaggacatgagagaagcggcaaagcatcttatagggacacatgattttacgagcttttgcgcggctaaaacagaagtgcaggacaaggtaagaacgatatacgaacttgattggactgagacggctgacggcctgcaaatgcggatcacaggcagcggtttcttatataatatggtcagaattattgcgggtactttgcttgatgcaggtattggaaaaatttctcccgatgaggtgaaatccatgctggaagcgaaggatcgcgaagcggcagggcgcacagcgccggggcacgggctatatttatggaacgtttactatgacaactaaaccaggtgtataatattttcttgacagagtctgcataaagttataagatatcatatggtatgtatttcaaccccacgataagccccggaacttattgtgttgtgaaatagaacgtaatcgaagtttattgaaaatgacagatcatttaggagggaaattcaatgcgtacaacacctatggctaacgcaagtactattgaacgcaagtggttagttgttgatgctgctggcaagactttaggtcgtctttcttcagaagttgcagctatccttcgcggaaaacacaaaccaacttacacaccacacgttgatactggagatcatgtgatcatcatcaacgctgaaaaaatcgagttaactggtaaaaagttaactgacaaaatctactaccgtcacactcaacatccaggcggattaaaatcaagaactgctcttgaaatgcgtacaaactaccctgagaaaatgcttgagcttgctatcaaaggcatgcttccaaaaggttctctaggtcgtcaaatgttcaaaaaattgaacgtataccgtggttctgagcatccacacgaagcacaaaaacctgaagtttacgaacttcgcggttaattaaaaaggaggttaccaatttggcacaggttcaatattacggtactggccgtcgtaaaagctctgtagcgcgtgtgcgtttagttccaggagaaggccgtatcgtcgttaataatcgtgaaatcagcgaacatatcccatctgcagctttaatcgaagatatcaaacaaccattaactttgactgaaacagctggcacttatgatgttttagtaaacgtacatggaggcggcctatctggtcaagctggagcaatccgtcacggtatcgctcgtgctttgcttgaagcagatccagaataccgtacaactcttaaacgtgcaggtcttctgactcgtgacgctcgtatgaaagaacgtaaaaaatacggtcttaaaggcgctcgtcgtgcacctcagttctcaaaacgttaattttacgttttcaaaaagctctcgaccttgggttgggagcttttttctttcaataaaacgtggcagcctcgcataaaaataacaactgaatggacgtttggcggggttaagcaaattgtttgtttataaacggtctctttgtaataatcatgttagctttcattcttattcaattggaacttcggtcaatgtttattatcgttatgtgctcagcccagcttcatctaaccactgtatctcatccgttaaagttcactgctgattcttaacccggagaaacaatagctctcattgctaatggctttatgtaacgaagtaaaagtaaatctgatgatataaatcacatatctcctttgtgatttttttgcgtttttatgaacttttttctaaatatgcaaagggaaagcgatatcaatctagaaatatttgttatactctatacattaaagtaaggagaagattcatgaatgcgttagtagctcataatagcaaagcctgggataaaaaagtagaaacaggcaatgaatggactgttgctgttgagcagcaggttatcgaacaagcaaaaaaaggcaattgggatataagggtaacaccaatgaaagatgtaccgaaggattggtttccgcctatcaaaggtctgaaagtactctgtttagcatcaggcggcggccagcagggtccagttttggcagccgcaggcgcggatgtcaccgtattagataactcagaaaaacaactgaatcaggataaaatgattgctgagcgagatggtctcacgatacacactgtcaaaggaagcatggacgatttaagtgtatttaatgatgaatcatttgatgtcattgtacatcctgttgccaatgtttttgttgagaatgtcctcccggtatggaaggaagcgtaccgtgtgttgaaaaggaacggcattctaatctcgggttttgtcaatcctgttgtatttctgtttgatacagaattagaacagcaaggtgttttaaaagtaaaacactccattccatacgctgacccagaagatcttccgaaacataaagtgaaaaaactgatcgaaaataatgaggctctggaattcggtcattccttagaagaccaaatcaaaggccagattgatgccggttttatcgttactggtttttatgaagataaaggcgggtttgtattagaccaatatatccatacatattctgcaacaagaagcgtgaaagtatgaaaagcagcgacctgttagaggggctgcttttttcataaccaattacagaacgtttgttccgcaccctgcggaaagctgattttttatcgattttacaccttcatttgggcgaatttccaaccgaattcgggcattgtttcatcatccaaacctcaaaataatcggtaaaaggagagtgaatttatatggcagaagtactgtcttttatggatgtgaaacgccaaaaggattttgaattagaaaagaacttgctcaaagaactctctctgagacaaattatccagtctgttaaggattgtttggaaccattatttccatttttacatgatgaacgagatattattactgaaggctgtattgattttgcgattgaagcttatttgttaggcgggcgttttgggatattcggctattacggagaatccatgcagagtatcagtgcccgctctgcaagagaagaagaagagctacgtatggagttttttgattatctctataattggatacacgagcaatacgcaacatttgataaaaacacggtttatgaagcggcacgcaagttcattaaagattggtggacagcggggtttgttcaaagagaaaaacagtgtaagcttcgcatgcgataatcatatttcccggccctgtcccatagttatgtaataacggacaagcgggaggggaagggatgaggaaaaagcttaaatggctcagttttttgctaggcttcatcgtattactatttctgttcaaatatcagttcagcaataacgactcttggaagccgtggagcttgcccttgagcggtaaaatcatttatctagatccaggtcatggcgggcctgacggcggagcagtcggcggaaagctgttagagaaggatgttaccctggaagtggcctttagagtcagggattatcttcaagaacaaggagcgcttgttatcatgaccagagaaagtgatactgatctcgctccagaaggaacaaaaggctatagtcgacgaaaagctgaggatctaagacaacgagtcaaattaataaaccattcagaggcggagctctatatcagcattcatcttaatgcgattccgtcacaaaaatggagcggagcccaaagcttttattacgggaaatatgcggaaaatgagaaagtcgcaaaatacatccaggatgagctgagaagaaatctggaaaacacaacccggaaagcaaagcggattcatggtatctacttaatgcaaaacgtcaccaaaccgggggcgcttatagaagtcggatttttatccaatccaaacgaagcaacgctactcggtaaaccgaaatatcacgacaaggtggcatcttccatatataaaggcattttgcgatatttcacagaaaaaggagaccctccggagtaatggagggttttcttgtggttctaagcataagacacccgccatttatgtatgatataataataattgtaaacgaatacacaaaagggtgaggttcgatgataagagaagatgaagtaagaaaactagtcggagaaatgcgcgaaccttttcttcaaagacctctgggagaattggatgccgttaaggaaattaaaataaagcctgaaaaacggcatatcagtgtaaaagtcgctcttgcaaaaacaggaactgcagaacaaatgcagattcagcaagagatcgtaaacgtattaaaaggggcaggagctgagacagtcggccttcgatttgaagagctgcctgaagaaacggttgctaaattccgggcgccgtcagctgagaaaaaaacattattaaatatggataacccgccagtctttcttgctgtagcaagtggaaaaggcggcgtaggcaagtcaactgtgtcagtaaacctagctatttctctggctcgtctagggaaaaaggttggtttaattgatgcggatatttatgggttcagtgtgccggacatgatgggtatcactgtgcgtccaacaattgaaggagagaaacttcttcctgttgaacgctttggagtaaaggtcatgtcaatgggctttttcgtagaagaaaatgccccggtcgtatggagagggcccatgctcggcaaaatgctgaataattttttccatgaagtagagtggggagaagtagactatatcgttcttgatcttccgcctggtacaggggacgttgctctcgatgtacatacaatgcttccgagctgcaaagaaattatcgtatctacgccacatccgacagctgcttttgtcgcggccagagcgggctctatggcgattaaaaccgatcatgaggtcgtgggtgtcatagagaacatggcttattatgaaagtgcaaagacaggggaaagagaatatgtgtttggaaaaggcggaggagataaactggctgaggaactaaacgtgcctttgctcggcagaatcccattgaaacagcccgattgggataaggaccaatttgctccgtctgtttatgacgaaaatcatccaatcggagaaatatatcaggacatcgcaaaaaaaatagatgcaaaaatgtcagtgcaggtataaaaggtgaaccgggattccagatcccggctttccctttattcactttcttttgctgtgtcttttgctgcttttttcagctcatcttcgaactgctttttgtaaagcggactagaaagtgtttcgttaataacctcttctaaataactgcggaattcttggctttttgccagctggctgtactttttatccatgccgggatcctgcataacgctcatcagcatcttctggtaatctggatccttcatcagctttttaatcactttttcatgctctgtctgaagagttttggcaaagccctcagcaaaatcagtgtcttcaaagatgtttttccaaaattcttcaccttttttagatgtgagtgttttttctattgttcctttaattgcatcttggtcaatcaccagcgcttcattcatggcatcatcatttaataattccttaatagctttctttccatcatcagtttttaatatatcaacaaccatttttttggtctgatcatagtccatatccgttgcttggtcttttggagcgcaagctgttacagataataacaaaaaacagctcatcaatagcgttttggcttttgacatgcttaagctcctttcacatacttgtcttacctttaatatgattcatctgtttggaattatacataacaaaatatcgctgttcgcgatttttgaggggatgaataaagaaatgaaaagccgtggtttagttcgttttttcttttctattttagctgtcggggcgcttatcacgagtattgtgggttttgctttaaagtggggagaatatagagggctgtttctaacatttgaagcgggacagattttctctgttttattttggtttatcggtgtaggcatgattttcagtgtgatcagccaaatgggttttttcgtgtttttaacagttcatcggtttgcgcttgagatattaaggtcctcctctttgtggaatttgctgcagttgtttttcatcctgtttgttgcttttgatttaatgtacgtgcgttttttattttttggagagagcggagaatcgctggctggctatgcgtggttaccggtgtttttattgatctttggagtgattacagcttatataaagcaaaagcagtcctctaagaaaacatttgtgtcatcgttatttttgatggttgtgattaccgcattagaatggttccctgcattaagagtaaatgatgaggactggctttatttaatgctttttccgttaatggcatgtaatgccttccaattgctgatgctgccgaagtttgcagcaaagtaattactttacctctgcggatttggcatcagaatttgcgatgagatcacccacggttacattttttaatcctttttctttcagctgatggatgatatcaggcaatgcttcttctgtttgttttgcagaatcggaggcatgtaaaagaataatgtctccaccggaaacttgcttggtcacattgtcgatgattttttcaactccgggatttgtccagtcttgagagttcacactgtaatgaacgactgtataattgtattgctttgcgacctttagaacattcttattgaattggccggtagggggtcttaatagctgtatgtctttgacccctaacttttcaaaggctgtttgcgcacggttcatgtccttttttatttcgctgctctctaaattggcatagtttttataagcgtagcccatgctcccgatttgatggccgtcctttacgatacgggccactgtgtcgggatggcgttctgcccaagaagcggacaggaaaaacgttgcgtttttaatcccgtttgctttcagagtattaagtatcggttctgctctctcatcaccccagctgatatcgaaagtaagtgaaatatctttagagtctgtttctcctttataaatggctttaggtccggtgtcagttgaaaacacgggaagcgggacagctctttggatataaaaaaagctggcagctgcaaatgcggcgataagtataataattaattgttttacccgtttaatgtgccacacatagaagtgattcactgatgatgcctccttatcttgtccatcattcttgttttacatcttatgagcatggacaattgaatataaccgataaaatgtctcttcacatacagcctaaattgggtgttgaccttttgataatatccgtgatatattattattcgtcgctgataaacagctgacatcaactaaaagcttcattaaatactttgaaaaaagttgttgacttaaaagaagctaaatgttatagtaataaagctgcttcgttaagcggcagtaatgatctttgaaaactaaacaagacaaaacgtacctgttaattcatttttataaatcgcacagcgatgtgcgtagtcagtcaaactagggcctgtacgatgcaggtcacacaggtgtcgccgcaggatgcggtgaacttaacctgtgatccatttatcggagagtttgatcctggctcaggacgaacgctggcggcgtgcctaatacatgcaagtcgagcggacagatgggagcttgctccctgatgttagcggcggacgggtgagtaacacgtgggtaacctgcctgtaagactgggataactccgggaaaccggggctaataccggatggttgtttgaaccgcatggttcaaacataaaaggtggcttcggctaccacttacagatggacccgcggcgcattagctagttggtgaggtaatggctcaccaaggcaacgatgcgtagccgacctgagagggtgatcggccacactgggactgagacacggcccagactcctacgggaggcagcagtagggaatcttccgcaatggacgaaagtctgacggagcaacgccgcgtgagtgatgaaggttttcggatcgtaaagctctgttgttagggaagaacaagtaccgttcgaatagggcggtaccttgacggtacctaaccagaaagccacggctaactacgtgccagcagccgcggtaatacgtaggtggcaagcgttgtccggaattattgggcgtaaagggctcgcaggcggtttcttaagtctgatgtgaaagcccccggctcaaccggggagggtcattggaaactggggaacttgagtgcagaagaggagagtggaattccacgtgtagcggtgaaatgcgtagagatgtggaggaacaccagtggcgaaggcgactctctggtctgtaactgacgctgaggagcgaaagcgtggggagcgaacaggattagataccctggtagtccacgccgtaaacgatgagtgctaagtgttagggggtttccgccccttagtgctgcagctaacgcattaagcactccgcctggggagtacggtcgcaagactgaaactcaaaggaattgacgggggcccgcacaagcggtggagcatgtggtttaattcgaagcaacgcgaagaaccttaccaggtcttgacatcctctgacaatcctagagataggacgtccccttcgggggcagagtgacaggtggtgcatggttgtcgtcagctcgtgtcgtgagatgttgggttaagtcccgcaacgagcgcaacccttgatcttagttgccagcattcagttgggcactctaaggtgactgccggtgacaaaccggaggaaggtggggatgacgtcaaatcatcatgccccttatgacctgggctacacacgtgctacaatggacagaacaaagggcagcgaaaccgcgaggttaagccaatcccacaaatctgttctcagttcggatcgcagtctgcaactcgactgcgtgaagctggaatcgctagtaatcgcggatcagcatgccgcggtgaatacgttcccgggccttgtacacaccgcccgtcacaccacgagagtttgtaacacccgaagtcggtgaggtaaccttttaggagccagccgccgaaggtgggacagatgattggggtgaagtcgtaacaaggtagccgtatcggaaggtgcggctggatcacctcctttctaaggatattatacggaatataagaccttgggtcttataaacagaacgttccctgtcttgtttagttttgaaggatcattccttcgaaacgtgttctttgaaaactagataacagtagacatcacattcaattagtaatacaagatatcacatagtgattctttttaacggttaagttagaaagggcgcacggtggatgccttggcactaggagccgatgaaggacgggacgaacaccgatatgcttcggggagctgtaagcaagctttgatccggagatttccgaatggggaaacccaccactcgtaatggagtggtatccatatctgaattcataggatatgagaaggcagacccggggaactgaaacatctaagtacccggaggaagagaaagcaaatgcgattccctgagtagcggcgagcgaaacgggattagcccaaaccaagaggcttgcctcttggggttgtaggacactctgtacggagttacaaaagaacgaggtagatgaagaggtctggaaaggcccgccataggaggtaacagccctgtagtcaaaacttcgttctctcctgagtggatcctgagtacggcggaacacgtgaaattccgtcggaatccgggaggaccatctcccaaggctaaatactccctagtgaccgatagtgaaccagtaccgtgagggaaaggtgaaaagcaccccggaaggggagtgaaagagatcctgaaaccgtgtgcctacaagtagtcagagcccgttaacgggtgatggcgtgccttttgtagaatgaaccggcgagttacgatcccgtgcaaggttaagcagaagatgcggagccgcagcgaaagcgagtctgaatagggcgcatgagtacgtggtcgtagacccgaaaccaggtgatctacccatgtccagggtgaagttcaggtaacactgaatggaggcccgaacccacgcacgttgaaaagtgcggggatgaggtgtgggtaggggtgaaatgccaatcgaacctggagatagctggttctctccgaaatagctttagggctagcctcaaggtaagagtcttggaggtagagcactgattggactaggggcccctaccgggttaccgaattcagtcaaactccgaatgccaatgacttatccttgggagtcagactgcgagtgataagatccgtagtcgaaagggaaacagcccagaccgccagctaaggtcccaaagtatacgttaagtggaaaaggatgtggagttgcttagacaaccaggatgttggcttagaagcagccaccatttaaagagtgcgtaatagctcactggtcgagtgactctgcgccgaaaatgtaccggggctaaacgtatcaccgaagctgcggactgttcttcgaacagtggtaggagagcgttctaagggctgtgaagccagaccggaaggactggtggagcgcttagaagtgagaatgccggtatgagtagcgaaagaggggtgagaatcccctccaccgaatgcctaaggtttcctgaggaaggctcgtccgctcagggttagtcgggacctaagccgaggccgaaaggcgtaggcgatggacaacaggttgatattcctgtaccacctcctcaccatttgagcaatggggggacgcaggaggatagggtaagcgcggtattggatatccgcgtccaagcagttaggctgggaaataggcaaatccgtttcccataaggctgagctgtgatggcgagcgaaatatagtagcgaagttcctgattccacactgccaagaaaagcctctagcgaggtgagaggtgcccgtaccgcaaaccgacacaggtaggcgaggagagaatcctaaggtgatcgagagaactctcgttaaggaactcggcaaaatgaccccgtaacttcgggagaaggggtgctctgttagggtgcaagcccgagagagccgcagtgaataggcccaggcgactgtttagcaaaaacacaggtctctgcgaagccgtaaggcgaagtataggggctgacgcctgcccggtgctggaaggttaagaggagcgcttagcgtaagcgaaggtgcgaattgaagccccagtaaacggcggccgtaactataacggtcctaaggtagcgaaattccttgtcgggtaagttccgacccgcacgaaaggcgcaacgatctgggcactgtctcaacgagagactcggtgaaattatagtacctgtgaagatgcaggttacccgcgacaggacggaaagaccccgtggagctttactgcagcctgatattgaatgttggtacagcttgtacaggataggtaggagccttggaaaccggagcgccagcttcggtggaggcatcggtgggatactaccctggctgtattgaccttctaacccgccgcccttatcgggcggggagacagtgtcaggtgggcagtttgactggggcggtcgcctcctaaaaggtaacggaggcgcccaaaggttccctcagaatggttggaaatcattcgcagagtgtaaaggcacaagggagcttgactgcgagacctacaagtcgagcagggacgaaagtcgggcttagtgatccggtggttccgcatggaagggccatcgctcaacggataaaagctaccccggggataacaggcttatctcccccaagagtccacatcgacggggaggtttggcacctcgatgtcggctcatcgcatcctggggctgtagtcggtcccaagggttgggctgttcgcccattaaagcggtacgcgagctgggttcagaacgtcgtgagacagttcggtccctatccgtcgcgggcgcaggaaatttgagaggagctgtccttagtacgagaggaccgggatggacgcaccgctggtgtaccagttgttctgccaagggcatcgctgggtagctatgtgcggacgggataagtgctgaaagcatctaagcatgaagcccccctcaagatgagatttcccattccgcaaggaagtaagatccctgaaagatgatcaggttgataggtctgaggtggaagtgtggcgacacatggagctgacagatactaatcgatcgaggacttaaccatatttttgaatgatgtcacacctgttatctagttttgagagaacactctcaatttgtttggtggcgatagcgaagaggtcacacccgttcccataccgaacacggaagttaagctcttcagcgccgatggtagtcgggggtttccccctgtgagagtaggacgccgccaagcagatttattaattctaccatgtttgtttatgaagctttatattattccgcagtagctcagtggtagagctatcggctgttaaccgatcggtcgtaggttcgaatcctacctgcggagccattgcttccatagctcagcaggtagagcacttccatggtaaggaagaggtcagcggttcgagcccgcttggaagctttatttaatgtattattaccaaggtttctcataaggagaaagctttttttattgcgatatgcggaagtagttcagtggtagaacaccaccttgccaaggtgggggtcgcgggttcgaatcccgtcttccgctccatttatcccaacgggatattgtaaattgaattgcgcccgtagctcaattggatagagcgtttgactacggatcaaaaggttaggggttcgactcctctcgggcgcgccatatcttttaatagaatagatgggaaatcgggaagtagctcagcttggtagagcacatggtttgggaccatggggtcgcaggttcgaatcctgtcttcccgaccattttttatggggccttagctcagctgggagagcgcctgctttgcacgcaggaggtcagcggttcgatcccgctaggctccaccaaaagtttttaaaaagttgttgactttgaagaagtgacgttgtatactaataaagttactttaacaaagcaaataaacaaaatgatctttgaaaactaaacaagacaaaacgtacctgttaattcagtttttaaaaaatcgcacagcgatgtgcgtagtcagtcaaactactttatcggagagtttgatcctggctcaggacgaacgctggcggcgtgcctaatacatgcaagtcgagcggacagatgggagcttgctccctgatgttagcggcggacgggtgagtaacacgtgggtaacctgcctgtaagactgggataactccgggaaaccggggctaataccggatggttgtttgaaccgcatggttcaaacataaaaggtggcttcggctaccacttacagatggacccgcggcgcattagctagttggtgaggtaacggctcaccaaggcgacgatgcgtagccgacctgagagggtgatcggccacactgggactgagacacggcccagactcctacgggaggcagcagtagggaatcttccgcaatggacgaaagtctgacggagcaacgccgcgtgagtgatgaaggttttcggatcgtaaagctctgttgttagggaagaacaagtaccgttcgaatagggcggtaccttgacggtacctaaccagaaagccacggctaactacgtgccagcagccgcggtaatacgtaggtggcaagcgttgtccggaattattgggcgtaaagggctcgcaggcggtttcttaagtctgatgtgaaagcccccggctcaaccggggagggtcattggaaactggggaacttgagtgcagaagaggagagtggaattccacgtgtagcggtgaaatgcgtagagatgtggaggaacaccagtggcgaaggcgactctctggtctgtaactgacgctgaggagcgaaagcgtggggagcgaacaggattagataccctggtagtccacgccgtaaacgatgagtgctaagtgttagggggtttccgccccttagtgctgcagctaacgcattaagcactccgcctggggagtacggtcgcaagactgaaactcaaaggaattgacgggggcccgcacaagcggtggagcatgtggtttaattcgaagcaacgcgaagaaccttaccaggtcttgacatcctctgacaatcctagagataggacgtccccttcgggggcagagtgacaggtggtgcatggttgtcgtcagctcgtgtcgtgagatgttgggttaagtcccgcaacgagcgcaacccttgatcttagttgccagcattcagttgggcactctaaggtgactgccggtgacaaaccggaggaaggtggggatgacgtcaaatcatcatgccccttatgacctgggctacacacgtgctacaatggacagaacaaagggcagcgaaaccgcgaggttaagccaatcccacaaatctgttctcagttcggatcgcagtctgcaactcgactgcgtgaagctggaatcgctagtaatcgcggatcagcatgccgcggtgaatacgttcccgggccttgtacacaccgcccgtcacaccacgagagtttgtaacacccgaagtcggtgaggtaaccttttaggagccagccgccgaaggtgggacagatgattggggtgaagtcgtaacaaggtagccgtatcggaaggtgcggctggatcacctcctttctaaggatattatacggaatataagaccttgggtcttataaacagaacgttccctgtcttgtttagttttgaaggatcattccttcgaaacgtgttctttgaaaactagataacagtagacatcacattcaattagtaatacaagatatcacatagtgattctttttaacggttaagttagaaagggcgcacggtggatgccttggcactaggagccgatgaaggacgggacgaacaccgatatgcttcggggagctgtaagcaagctttgatccggagatttccgaatggggaaacccaccactcgtaatggagtggtatccatatctgaattcataggatatgagaaggcagacccggggaactgaaacatctaagtacccggaggaagagaaagcaaatgcgattccctgagtagcggcgagcgaaacgggattagcccaaaccaagaggcttgcctcttggggttgtaggacactctgtacggagttacaaaagaacgaggtagatgaagaggtctggaaaggcccgccataggaggtaacagccctgtagtcaaaacttcgttctctcctgagtggatcctgagtacggcggaacacgtgaaattccgtcggaatccgggaggaccatctcccaaggctaaatactccctagtgaccgatagtgaaccagtaccgtgagggaaaggtgaaaagcaccccggaaggggagtgaaagagatcctgaaaccgtgtgcctacaagtagtcagagcccgttaacgggtgatggcgtgccttttgtagaatgaaccggcgagttacgatcccgtgcaaggttaagcagaagatgcggagccgcagcgaaagcgagtctgaatagggcgcatgagtacgtggtcgtagacccgaaaccaggtgatctacccatgtccagggtgaagttcaggtaacactgaatggaggcccgaacccacgcacgttgaaaagtgcggggatgaggtgtgggtaggggtgaaatgccaatcgaacctggagatagctggttctctccgaaatagctttagggctagcctcaaggtaagagtcttggaggtagagcactgattggactaggggcccctaccgggttaccgaattcagtcaaactccgaatgccaatgacttatccttgggagtcagactgcgagtgataagatccgtagtcgaaagggaaacagcccagaccgccagctaaggtcccaaagtatacgttaagtggaaaaggatgtggagttgcttagacaaccaggatgttggcttagaagcagccaccatttaaagagtgcgtaatagctcactggtcgagtgactctgcgccgaaaatgtaccggggctaaacgtatcaccgaagctgcggactgttcttcgaacagtggtaggagagcgttctaagggctgtgaagccagaccggaaggactggtggagcgcttagaagtgagaatgccggtatgagtagcgaaagaggggtgagaatcccctccaccgaatgcctaaggtttcctgaggaaggctcgtccgctcagggttagtcgggacctaagccgaggccgaaaggcgtaggcgatggacaacaggttgatattcctgtaccacctcctcaccatttgagcaatggggggacgcaggaggatagggtaagcgcggtattggatatccgcgtccaagcagttaggctgggaaataggcaaatccgtttcccataaggctgagctgtgatggcgagcgaaatatagtagcgaagttcctgattccacactgccaagaaaagcctctagcgaggtgagaggtgcccgtaccgcaaaccgacacaggtaggcgaggagagaatcctaaggtgatcgagagaactctcgttaaggaactcggcaaaatgaccccgtaacttcgggagaaggggtgctctgttagggtgcaagcccgagagagccgcagtgaataggcccaggcgactgtttagcaaaaacacaggtctctgcgaagccgtaaggcgaagtataggggctgacgcctgcccggtgctggaaggttaagaggagcgcttagcgtaagcgaaggtgcgaattgaagccccagtaaacggcggccgtaactataacggtcctaaggtagcgaaattccttgtcgggtaagttccgacccgcacgaaaggcgcaacgatctgggcactgtctcaacgagagactcggtgaaattatagtacctgtgaagatgcaggttacccgcgacaggacggaaagaccccgtggagctttactgcagcctgatattgaatgttggtacagcttgtacaggataggtaggagccttggaaaccggagcgccagcttcggtggaggcatcggtgggatactaccctggctgtattgaccttctaacccgccgcccttatcgggcggggagacagtgtcaggtgggcagtttgactggggcggtcgcctcctaaaaggtaacggaggcgcccaaaggttccctcagaatggttggaaatcattcgcagagtgtaaaggcacaagggagcttgactgcgagacctacaagtcgagcagggacgaaagtcgggcttagtgatccggtggttccgcatggaagggccatcgctcaacggataaaagctaccccggggataacaggcttatctcccccaagagtccacatcgacggggaggtttggcacctcgatgtcggctcatcgcatcctggggctgtagtcggtcccaagggttgggctgttcgcccattaaagcggtacgcgagctgggttcagaacgtcgtgagacagttcggtccctatccgtcgcgggcgcaggaaatttgagaggagctgtccttagtacgagaggaccgggatggacgcaccgctggtgtaccagttgttctgccaagggcatcgctgggtagctatgtgcggacgggataagtgctgaaagcatctaagcatgaagcccccctcaagatgagatttcccattccgcaaggaagtaagatccctgaaagatgatcaggttgataggtctgaggtggaagtgtggcgacacatggagctgacagatactaatcgatcgaggacttaaccatatttttgaatgatgtcacacctgttatctagttttgagagaacactctcaatttgtttggtggcgatagcgaagaggtcacacccgttcccataccgaacacggaagttaagctcttcagcgccgatggtagtcgggggtttccccctgtgagagtaggacgccgccaagcaattgcacgttagtgtaattttttaaaaaaagttgttgactttgaagaagtgacgttgtatactaataaagttgctttaacaaagcggacaaacaaaatgatctttgaaaactaaacaagacaaaacgtacctgttaattcagtttttaaaaatcgcacagcgatgtgcgtagtcagtcaaactactttatcggagagtttgatcctggctcaggacgaacgctggcggcgtgcctaatacatgcaagtcgagcggacagatgggagcttgctccctgatgttagcggcggacgggtgagtaacacgtgggtaacctgcctgtaagactgggataactccgggaaaccggggctaataccggatggttgtttgaaccgcatggttcaaacataaaaggtggcttcggctaccacttacagatggacccgcggcgcattagctagttggtgaggtaacggctcaccaaggcgacgatgcgtagccgacctgagagggtgatcggccacactgggactgagacacggcccagactcctacgggaggcagcagtagggaatcttccgcaatggacgaaagtctgacggagcaacgccgcgtgagtgatgaaggttttcggatcgtaaagctctgttgttagggaagaacaagtaccgttcgaatagggcggtaccttgacggtacctaaccagaaagccacggctaactacgtgccagcagccgcggtaatacgtaggtggcaagcgttgtccggaattattgggcgtaaagggctcgcaggcggtttcttaagtctgatgtgaaagcccccggctcaaccggggagggtcattggaaactggggaacttgagtgcagaagaggagagtggaattccacgtgtagcggtgaaatgcgtagagatgtggaggaacaccagtggcgaaggcgactctctggtctgtaactgacgctgaggagcgaaagcgtggggagcgaacaggattagataccctggtagtccacgccgtaaacgatgagtgctaagtgttagggggtttccgccccttagtgctgcagctaacgcattaagcactccgcctggggagtacggtcgcaagactgaaactcaaaggaattgacgggggcccgcacaagcggtggagcatgtggtttaattcgaagcaacgcgaagaaccttaccaggtcttgacatcctctgacaatcctagagataggacgtccccttcgggggcagagtgacaggtggtgcatggttgtcgtcagctcgtgtcgtgagatgttgggttaagtcccgcaacgagcgcaacccttgatcttagttgccagcattcagttgggcactctaaggtgactgccggtgacaaaccggaggaaggtggggatgacgtcaaatcatcatgccccttatgacctgggctacacacgtgctacaatggacagaacaaagggcagcgaaaccgcgaggttaagccaatcccacaaatctgttctcagttcggatcgcagtctgcaactcgactgcgtgaagctggaatcgctagtaatcgcggatcagcatgccgcggtgaatacgttcccgggccttgtacacaccgcccgtcacaccacgagagtttgtaacacccgaagtcggtgaggtaaccttttaggagccagccgccgaaggtgggacagatgattggggtgaagtcgtaacaaggtagccgtatcggaaggtgcggctggatcacctcctttctaaggatattatacggaatataagaccttgggtcttataaacagaacgttccctgtcttgtttagttttgaaggatcattccttcgaaacgtgttctttgaaaactagataacagtagacatcacattcaattagtaacacaagatatcacatagtgattctttttaacggttaagttagaaagggcgcacggtggatgccttggcactaggagccgatgaaggacgggacgaacaccgatatgcttcggggagctgtaagcaagctttgatccggagatttccgaatggggaaacccaccactcgtaatggagtggtatccatatctgaattcataggatatgagaaggcagacccggggaactgaaacatctaagtacccggaggaagagaaagcaaatgcgattccctgagtagcggcgagcgaaacgggattagcccaaaccaagaggcttgcctcttggggttgtaggacactctgtacggagttacaaaagaacgaggtagatgaagaggtctggaaaggcccgccataggaggtaacagccctgtagtcaaaacttcgttctctcctgagtggatcctgagtacggcggaacacgtgaaattccgtcggaatccgggaggaccatctcccaaggctaaatactccctagtgaccgatagtgaaccagtaccgtgagggaaaggtgaaaagcaccccggaaggggagtgaaagagatcctgaaaccgtgtgcctacaagtagtcagagcccgttaacgggtgatggcgtgccttttgtagaatgaaccggcgagttacgatcccgtgcaaggttaagcagaagatgcggagccgcagcgaaagcgagtctgaatagggcgcatgagtacgtggtcgtagacccgaaaccaggtgatctacccatgtccagggtgaagttcaggtaacactgaatggaggcccgaacccacgcacgttgaaaagtgcggggatgaggtgtgggtaggggtgaaatgccaatcgaacctggagatagctggttctctccgaaatagctttagggctagcctcaaggtaagagtcttggaggtagagcactgattggactaggggcccctaccgggttaccgaattcagtcaaactccgaatgccaatgacttatccttgggagtcagactgcgagtgataagatccgtagtcgaaagggaaacagcccagaccgccagctaaggtcccaaagtatacgttaagtggaaaaggatgtggagttgcttagacaaccaggatgttggcttagaagcagccaccatttaaagagtgcgtaatagctcactggtcgagtgactctgcgccgaaaatgtaccggggctaaacgtatcaccgaagctgcggactgttcttcgaacagtggtaggagagcgttctaagggctgtgaagccagaccggaaggactggtggagcgcttagaagtgagaatgccggtatgagtagcgaaagaggggtgagaatcccctccaccgaatgcctaaggtttcctgaggaaggctcgtccgctcagggttagtcgggacctaagccgaggccgaaaggcgtaggcgatggacaacaggttgatattcctgtaccacctcctcaccatttgagcaatggggggacgcaggaggatagggtaagcgcggtattggatatccgcgtccaagcagttaggctgggaaataggcaaatccgtttcccataaggctgagctgtgatggcgagcgaaatatagtagcgaagttcctgattccacactgccaagaaaagcctctagcgaggtgagaggtgcccgtaccgcaaaccgacacaggtaggcgaggagagaatcctaaggtgatcgagagaactctcgttaaggaactcggcaaaatgaccccgtaacttcgggagaaggggtgctctgttagggtgcaagcccgagagagccgcagtgaataggcccaggcgactgtttagcaaaaacacaggtctctgcgaagccgtaaggcgaagtataggggctgacgcctgcccggtgctggaaggttaagaggagcgcttagcgtaagcgaaggtgcgaattgaagccccagtaaacggcggccgtaactataacggtcctaaggtagcgaaattccttgtcgggtaagttccgacccgcacgaaaggcgcaacgatctgggcactgtctcaacgagagactcggtgaaattatagtacctgtgaagatgcaggttacccgcgacaggacggaaagaccccgtggagctttactgcagcctgatattgaatgttggtacagcttgtacaggataggtaggagccttggaaaccggagcgccagcttcggtggaggcatcggtgggatactaccctggctgtattgaccttctaacccgccgcccttatcgggcggggagacagtgtcaggtgggcagtttgactggggcggtcgcctcctaaaaggtaacggaggcgcccaaaggttccctcagaatggttggaaatcattcgcagagtgtaaaggcacaagggagcttgactgcgagacctacaagtcgagcagggacgaaagtcgggcttagtgatccggtggttccgcatggaagggccatcgctcaacggataaaagctaccccggggataacaggcttatctcccccaagagtccacatcgacggggaggtttggcacctcgatgtcggctcatcgcatcctggggctgtagtcggtcccaagggttgggctgttcgcccattaaagcggtacgcgagctgggttcagaacgtcgtgagacagttcggtccctatccgtcgcgggcgcaggaaatttgagaggagctgtccttagtacgagaggaccgggatggacgcaccgctggtgtaccagttgttctgccaagggcatcgctgggtagctatgtgcggacgggataagtgctgaaagcatctaagcatgaagcccccctcaagatgagatttcccattccgcaaggaagtaagatccctgaaagatgatcaggttgataggtctgaggtggaagtgtggcgacacatggagctgacagatactaatcgatcgaggacttaaccatatttttgaatgatgtcacacctgttatctagttttgagagaacactctcaatttgtttggtggcgatagcgaagaggtcacacccgttcccataccgaacacggaagttaagctcttcagcgccgatggtagtcgggggtttccccctgtgagagtaggacgccgccaagcaagcttaaacccagctcattgagctgggttttttattttatatctgtgccgatttgcttttatcagtatccattttatcaagcttctgctttttaagttttctaatacttttgaatccaatacaatcaccagcatgatcaacatgagagtcataaataatcaaaatgcagtttgtacgggagactcatccagactccatccgtctgcaattggcagaatagagccgccaatccattggcagcgagcagcatgcctgtcgtttgttctgtttttccatgatgaaattgattggtgacaattaagataatggcgaacatgctggccataaataagtcctaagaaaaaactaagaataatccctgcaaaagctgttttattgattgccaaaatacagagttaaatgaggccgctcatatttatcagcctgagataatgatgataggttattttttcggaaaccggctcgggttgccaaatgagagaaaagatattactgtcattaaaacgattcttggtttcatccggatatgataaaatgtctcagactatatttgagccatttttttcttcagcaatcatcttgcgtaattgataaaaatttattatgatactctttgtatgacaactccttgcctcaatacaatatactcaacgtttccccgttttctccggtcgtttttcttttcattttctcccgtaaaataaaaaaagctcccaatacaatagatatggtgcggatttattttttactaaaaaggagtcgttatatttgaataatagttttacattaaaacagcaatggttcgggaatatccgaaaagacattcttgctggcattttagttgcgttagcgttaatacctgaagcgattggcttttctattatagccggtgtggatccgatggtcggtctttatgcgtcattttgcatagccattattatttctatttttggcggcagacctggcatgatttcagctgcgacaggctcaatggcagttgttatggtgtcgctggttgctgatcatgggcttcagtatttatttgcagctacgattttgactggcattattcaagtgattttaggtatcagtaaaattgcaagattaatgaaattcatcccgcgttctgtgatgatcgggtttgtgaatgcgctggcaatccttatcttctctgcgcagcttccccagtttgaaggtgcttcttggagcatgtatgcgatgcttgccgggtcgttggttattatttatgtgctgccaaggtttacgactgctgttccgtctccgcttgtggcgattattgtgatgacaattattgcggtcactttccatgtggatgtgcggacggttggtgatatgggcaatatttctagttcattgcctcatttcttaatccctgatgttccgtttacctttgaaacactgcaaattatttttccttattcaattgctttagcgtttgtcgggttgcttgaatctttgctgacagcacagattattgatgaaatgacggatacggatagtgataaaaataaagagagccgcggacagggaattgcgaatatcgtgactggattctttggcggaatggcaggctgcgctatgatcggacaatctgtcattaatacaaaagcgggcggtcgcggacgtttgtcagcatttgttgccggtgcttttctgatgtttttaattgcggtgttaagtcatgtcgtggtgaaaatcccaatggcggcgttagtggctgtaatggttatggtgtctgtcggcacttttgattggtcttctttaaaaggtctcaaaaaagcgccgctcacggactcgattgtcacggttgtgactgtggttacggttgttgtgacagatgacttatctaagggtgtatttgtcggtgttcttttaagtgccgtgttctttgtagcaaaaatctcgaagctgaaaatcgtttctcatgcagaggatcaaaagcttagaacgtatcaagtgaaggggcaaatcttttttgcgtcagtgactgatcttacgaatgcgtttatatatcaagaggatattgagcgggttgtgattgacttaactgaagctcacgtatgggacgattctggtgcggccgcacttgataagattgttgcgaagtttaaggaacaaggcattgaagctgagttaaaaggtttgaataaagcgagtaaatctctaatgaaacagatggcataaaatagagaagcccagatgaatgagatctgggcttttttatataacatacacttaagcagcattgatataatagagagaagagaaattttaaataggggacttgcatatgatgcttcagaagctgaaccgtgtattggggagagtgatgccgctgttaacgccgactagtgtggtgttgggcgtgctgctgtctcagtttttaaatgggtatgaatgggctgtaccttggatctttgcttttattacgtttgcaggcagtttgagcgcgaactttcaatctttgagacatgcattgtctcatcctctccctatgattcttgcactattcgttcttcatattttcatgccgctttttgcttggggcagcggccatcttatatttaaaggtgatcctttgacgattaccggtttaacattggctgttgtgattcctacggggattacaagcttgatttgggcagcgatgtacaaagggaatgtcggtttgacactttcgattattttaattgatactgtgctgtcaccgctaatcgtaccgctgagtctttcattgctggccggcgctcaggttcatatggatgtgtggggaatgatgaaaggtctgattgtaatggtcgtgattccttcttttctgggcatgctgtttaatcagatgtcatctccagaaagaactgcgtctgtgagcagtgcgctgtcgcctttttcaaagctttgcttgatggcagtgattgcgattaacagttcagcgattgctccttatttcaaatccattgatttgagatttgcaggaatagctgtaacggtattctttatcgcgttaacaggctatgccgctgcttggctgatcggaaaaatgatgaaaaggcggcaagaggaaatagtctctcttatatttacgggaggcatgaggaatattagtgccggcgcagttcttgccgttacgttcttcccgtctcaggttgccgttcctgttgtgatcggcatgctgtttcagcagatattggctgctttgtttggctatatgctgaatcgttttgaattaaaaccaatgttgcagaaagcataaaaaaaccgctcatagggttgagcggttttttccgtatagccattcgagcgcgttgatgaactgtttgcagaaatacttgcggtggtgcaccgctcctttttcaattgaaagatacaaccggtcttcagtgaagcctttttcttttagactttgatgaacttgctttgtttttttcagcatatgtcgctgaatggattgtttttcacggccttcttcactcccgacagacatgaaaacacgtgtagtgccgggctttaaagaagatatatgaatggtttccgctgcgttctcgtaccagtatgaacctgatatagagcctattttcccgaacattgacggatattttaataaggcgaacattgagatgaggccgcctaatgaggcaccgatcattcctcttgactgcggttccctgatgacgttccagttttcttcgattagcggaatgaactggttcgttatatcagacagatagtgatatcccattccgccgaagtccgtgaaccgatcactgagtgatgcagccggccaaggtgtgtattcatttagccggttttcgggttcgataccgatcagcacgagttcagggagcctttgctgttgatatgcgctttctaataattcgatttggttttggaacaaagaactgccatcctgcacgtaaacagcaggaaatcccccgctgtctgtgctgtaggaaggagggaggtacagcgtgaacctcctgttgccggctttgtgttctgaaagagatcctttcaagcattctccccctttttttgcttgaaaagcagatataagaaataaggaactccgaggatcgccaaaatgatgcctgcgggcacttctgcgggctgaaaaaacagttttccggcaaagtctgcgcttatcacaagaagcatcccgattaaaccgctcagtggcaggatatagcgatgttcgacgccagccagtctccgtgagatatggggagcaattaagccgacaaacgccatacttcccgctacggagacacaggcgctgatgattgctacacaggctacgagcaggatggttttttctttatttgatgaaatgccgaggcttctgactgtgtcttcatcaaaacgaatggtgtcgagcaggcgggatttgccgataagaatcggtataaacagcagcatccatgggagaacggctgtgatatacgtccagttggcagaccagatgcttccgtttttccacaccatggccatttgatagtcttgcgggtccatttttaaagataaaaacaaagacagggcgctgaatcctgaattgatcgcaatccctaccagaataattcttcctgaatctaaattgcctctgtgccatgcaaatatgtaaatcaggatcgccgcgatgagcccgcctatcaatccaaagagcggcattcccatcgctgcagctatggatgtcacttccttctggccttggaataagagcataaacgctacaatgccggctcctgcccctgcgttgattccgagaattccaggatcagcaagcccgtttctcgtgatggcctggataacagcgcctgcaatgccaagaccgagtccaataatagcagccatgacaacccgcggcagccttaaatcgaacagcaaaatttcatactgcggattcgggtagatttgaaaaagagtggagagcagctcagcaggacgaacagaaaatgatccgctcgttaagctgaaataactgacaacaagaatcaaagcgatgaacaatgcatattttttagccattttgctcccctccttttcgtttaattaaataaaggaagaaaggtacgccgataatggatgttacgacctcaatcggtgtttcaaacggatagttgataaatctgcttgcgagatcacacagggttaaaaagattccgcccaaaatacaggagcacggaatcagcctgctgtaatcagagccgacgagaaatctcgtgatatgcggaacaaccaatccgacaaacgcaatttttccggccagcgctacggcactgccggttaaaatgatgacggaaagcatcgccatgattttaatggtttttttcttttgccccaggcttttagaaatgtcgtcccctaatgatacagcggttacctttttgctgagagaaatggccattataatgccaatcaggaaaaacggagcggcgagcttcaggaaatccggactcatttgatgaagtctggcactgtaccagaaactgagatcctgagaaatttgaaaataaatcgacatggccgctgataagctgctgagcagcatgcttgtgactgtgccgatgatggcgagctgcacgggggtaaatccgtttggcatcatggcggcaaggccgaatactaacacagctcctaacgctgagccgataaaagagtatatcatcatttcaatcgaagatgattgcgggagcagaaccatgcaaagcgtaatgataaacgctgaaccatctgaaacacccataatggatggcgaagctaaataattgcgcgtaatgccctgcataagcgctccagaaacagcaagggctgcccctatgagcagagcgccggcagcccttggaatccgggaatgccatataatttgatggtctgtgtttcccggatcgaaatgaataagagatgtaaaaacaatatctgtgctaagatgctttgccccataaaggattgaaagtaaaagtgacagcgctatagcaaatggagaagtaatcaatatgatacgtgtccactgttttgaatacatacaaaaacctactctgaattagttttgtgtcaatttttcagcagccgctttcaggaaacggactttgctccaagctgtgccgccttgtgcgagagggtccactgagttgacatacacatggtcttctttgactgctttaaggcttttccagattggatttttctctaaatcttttaaggcatcaggtttatctgcattttcatcatcagaaaattggacgaaaatatggtccgggttcatttcacttaatttttctaatgaaatcagctcttgcgcttttgcagcttttacttcgttaggcgccttaaggcctaaatcaccgtatagtgtggagttgaaatacacctgttcagggtaaatgtaaatgttgccttgtctaattctaatgacaagcgcttttgaatctttcgctttatcgttgatttttgtttttgtttcttttagatcttgttcatagtctgcaataattttctttgcttttttctcttttccggtcagctgggcaagcagcatcatgttttccttccagtttgaagagatatgagaaactgggatcgtcgtgcctgctgtgctgattttttgcagcgttttttccggaaactttgttgaagcaaggataacatctggcttcatttcaagaatcttttcaatatttggctccattttttctccggttggttcggctttatcagtgatgtctttgaacatatcagggaatttgccggagaatgaaattgcgccttgcggatgaacgtcaagcaatttcgcgtcttccattgattcaacgcttcccgtaatggcgattttgtctgtcggtacagttacttcatatgttttatcaagatattcaattttcttcttctcagatgctgtgccgcttgccttgctggcagttgattcatttttgctgccgcaagctgccgccgtcagcgcgagaagcaagattaataaggtaagagatatctttttcatctatagagcctcctgttcaattgataactattatcaattggaattatagagaatgaacagatataacaccatggacaaattcctgatttatcatggacaatctccggatagtaaagaaacagtttgctgaacgatgcgttcgtgcccgcaagctgagtattcattccacgggtcaagggatagaagataaacacggttatctcgtaccgcgcttaggttttgccatgcttctgtctgctgtaattgctggtagtaagctatggtctccggctctttaaaaagaaaaagcatcatacagtcagcttggtaatttgcgatattttctaacgaaatcgcttgttctgaaggtgtgtcagccgttgttgccgagctgaatcctaaatccccaaagaaaacttcgcggacacttcggttatgtgccagatagaagttttgcttatgcagcctcaaaaagagaaaacgcagcccttgaacgtgctgaagtgtttttttggcggctgttgtctgctggtcataatccgctagccacttttctgcttcggactcctcctttaaaaatgaggcagtttgcagaaagtgggttctccagctttcttctgaaggaaggtacatgacttctgcgatgcgattcaggcgatcttgttcttctggagaaatagaatccatgctgacaatcacatctggttctgcctgcgataacgtgtacaggttttcttcccacttttcattaaaccggtatgcactgagctggacgggtatatctgtcgaataatgctgatagtagtaagacgtccatttcggatgcagagcggccgcaaaaggtatgtggtgaagagggatgagatggcccattgtgccccttccgtatgcggcgattttctttcggcgttttttcatatagcttgtaggtgaacagcctgtatattttttaaagattctgctgaaataaaattcatcttgataaccggtttggtgtgcgatttctttcaatttgcagtttgattttgccatgagccgttttgcctttgtgattcgtgttttcgtaataaattctgttacgctctgtcctgtccattttttaaagctttcactgtagtgtttggcactgattcctgccatttgcgacagctgggcaagcgtgatttttgtatcggcatgtgtttcgatatagtgttttgttttttcgattgctgaatgtgtatccgtttgatcagataaactggcagtaaaaagatcataaatcaggctttgtacttcaatcacacattttagctgagaaagctgagacgattcattccatagtgcggcaagctcttgaagccggactgcaagattttcgatatgtgaaacattcataagcttcagtttggctaattccgattctgtgcacggtgtgtaaatatcttggccggcttccttgatatagctttgaagcctgatcagacaggcatctatatgtccatcggctgctggcataaagccaaaggtctcgttaggcggacaaacataaagtgtctttttttgcagaggattggtgtttgttccgatcgaaatatagccgtttccttttaaatgaaaaatcagcacgaatgaatcggctaattgctgttctgagaagagatcacttgtcttttttagatattcaatttgtatcggttgataaatcactgcattttgcacgagtagaccaccttttcagaagctttcaattgataatcattttcaataaaaattgtaccaaataaatgaaagttttcctatataaagcgggtgggtttttagcatgaaaaaaacccttacttatgtgtaaaagtaagggtctttcgttcagtaagaatatgttacacgtgtaacatacgatgcttacgttctaataaatgagatatttttttcttgttttgctgaattgttggagtgttttttcatagctgtttatgatgccctcaaccgaagttccattttcaatttttgtcctgatccagccgttgcctgccagtttatcgaatgaacctgttgacaggaactcaaaatcctcaggatagagatcgtgtatggttttaatgactgaaagacccgttttaacggcttcaaacttatctctgtctgtcacatagagctgcacaccgtggcaaagcgttccttgatgtttagaaaacgtcggtgtgaaggatgctgccctaaatgttacgcccggcaaatggaggctgtttaatgtttcttcaagttctgtgcttttgataaagggagctccgatcaattcgaatggctttgttgtccctcgcccttcggatatatttgttccttcaatcagcccggttgcaggataaacaaatgtgctttccaccgtcggcatgttaggcgaagggaggacgaaaggcaatcgggtatcgtcaaaatccatttttcgtttccagtgtttcatttttaccactgtaagatcggcatcaatatcaaattctttgttgaacagtaaagccaattcgcctatcgtcatcccatgcttcaatggaatgggatacaatccgacaaatgaggcgtattcaggttctaagattggcccttcaatatgattcccgccttggggattcggacggtctagcaccataaatggaatgccgttttctttagcggcttccattgcgtatgccattgtataaatgtacgtgtagaaacgggtcccgacatcctgaatgtcaaacattagaatatcgacatttttcagcatttctggagtcggttttttcgtttttccgtagaggctgtatacgggaaccccggttttttcgtcaatgtaagagcctacttcgtctccagcctgggcgtcaccgcggacgccgtgttcagggccgaataaagctgtcagtttgatatctgggttctcgtaaagaatatcgacactgcttttcagagatgcgtttactccggttggattggtgatcagtccgatgcgttttcccttgagctgttttttatagtctggcaagagcgtgtctatcccagtctggactttaggttttttagccgtttgattctttgaatcgggtgaagcagaggcagcggttatcgttccgaacatcatgagccctgtcagaaaagcgaatattgtttttctcatgtgtccctccttattaaagcggtcttcccgttttgatatttaatccgtagccatatggataaagggtgtcccccgggttcgtgactgatgggatgttaactggaagtgtgcctttaggttttgcctggccgaaaatcgccatcactccggccggaatattaggttgaagataacggccatttgcgtatcctttaaagccatagactgcaatcagtgcctttgcttcttcgaaattggcggcatcatatgggttgcgcaggctcattaagacaaatggtttgttgtgctgcagtgcggctttcatgacagctctcggaaacacggtggcccatttgcttgaatctgatattgtgtcgtcgatgacaccgtcgttgacgacagggtcatttttgacgacataggagccggttatgatataatcagccttttttacttgttttgcatgctcggcattaaatacttggttggcaaaattcattttgtcgacagatacgggtttgattttctttcgcttgatgagatcgtgaatggtttgttcgattgaagcagtttgttcttcgtaaggtgccacaattaagattcggctgccttttttaggcttgaacggcaaagtgtgctgttcattttttaatacagttactgctttttcagctatttttttctctgttttcaggtgctgctggcttcctacgatttttttggctttggctattttttcttttgtactgtcgctgtttcgtgctggatacatgccgcgttttattttcagggaaatgattctttcaactgatttgttgatttgttgttcaggaatatccccgtttttcacggcttctttcaaagcttgaatgacacgtgcgaatttctgttcttctttcattgaagtgactgaggctggcattaatgcaatatcgacaccagcttttacggccatgaccacagcctcctcctgtccgaaatgatctgcaattgccttcatattgagcgcatcggtaacgatgaccccattaaagcccatttcctgacgaagaagacctgtcatcactttttgcgaaagtgtagctggaaccagaatgtccgatccatcgagtttgcttttgtatgtggtgtcgtcgaaggcagggaattgaacatgggctgtcatcaccatatcagcaccagcatcaattgctttttgaaaaggataaagctcgacctcacgaagccgttcttggccatgggaaacgagcggcagtccataatggctgtcaacgtccgtgtctccatgtcccgggaaatgtttgagggcagacgcgatatcctgccgctgcaaccctttcatcgtatatagaccgaggcgtgatgtcagttctcgattggagctgaatgaccgtacgccgattacaggattatcaggattattgttaatgtccacgacagggctgaaatctgtattgatgcctaaggcagagagctctttcccgatgatgctgccggtctgatacgcattgattctgcttctggctgcgcccagcgccatattccctgggaaattagtgccctcccctaacctcgttacaatgccgccttcctgatcaatactcagcatgagcgggatttttggacttgccttttggtaatcgtctgtcagttggacagtttgttttgttgtttttacattttctgcaaaaaggatgatgcctccgaattgatatttcttgacgaggctggcgacttcatcattcatttctgtaagggcttgcggagaggactcgccttccttttgccaatttctaaaatcaggcatcagcatctggccgagtttttcatctaacgacatacgattgacaatctgattggcatcgattgaacgtttggatgcagaggcttctgtctgtctggccccgaaaaagcatgaaagaaagagaacggctgaaaggataagcggaaagacaggtctcatagaaacttcctcctatcgtctaatcattcactccatcgcttcataaatcgcggttatgacacttccataactgcctgttgcaaattgatcaccctcaaagacgtttggattttcttccggatcaataactggtgtatgctttttatttgttaacaatgcgatgcctaaattgtatgctggatcaataattgtaactgtccctgtccagccggtatgcccgtaagcattttcactggcatgagggccaaacatccattccacgcttttacttccgttccgcctccagccaagagcgaatgtcgggtctgttgctgaaggtgctgtaaacaggtcggctgttttctgatcaaataaagaaatgtttcggtatgaacctttgtttaacatgacttgcagcagtatggccatatcatctgcatttgagaacaatccggcatgcccagacacgccatccattgagtaaaacgctttttcgtcatgcacctctccttgcagcgtgtttgtgcggatgttagggaattgaataacgccgtcacgtgtattgcccattcgttcagtagctgcgaactgtttcggtttaaagcccttttgcagcggattgtacaaggtatgcttcagcctgagcggtttgtagagctcttgctccgtgtagacatcaagcggtttgccagtgagtttttcgacaatacacccaagtagaatatatccaatgtcactgtatacgtgttttgtcccggtttgataatcgagcggaattttcgtcaaatattcaatcgttttgtcccgttcttgggaatagtacttaccggctttttccggcgtgtaaaagtaaaagcttgatgggagtcctgattggtgctggaggacatcgatgacacgtatcttgtcttttccttttatgaggtcacccggctgatccttgaaacccggcaaatatgcagaaactttttcatagacgtcaagttttccttggctgactaagcgctgcaatgcaaaatttgttgcgtacatttttgtatttgaggctaagtcaaacatcgtgcgggttttcattttggccggacggcgcagcagttctgatccttcgtactttttactgtagccgtatgctgctttttttatgatgcgtccatccttcaccaccacaagaacggcgcctggaaatcctgctgcaatatcccgttctatcatctgatctaccttctttagcttcttcgtcgagaattgtgcagtttctgcatttatggttttcggctcaaccaagttgtctgctgtttgtgcgaaggtttcatttggcgcgaatatcgatagggttaaaatggcactgaatatgaacagtgtctttgttttcacaggctagcccctttctgtgcttctatcccgtttactatccctaaaacagaaacaatttaatcgaactgagaagccatttcatctttatatccgaatgcataggtcaataaaaagccggccgcgtaggaaataaagagcccaacgatatacaggatgatttgcgaaggcaggactagaaaggaaagcggcagtccggagacaccaatcgcaatggtggctacttgaaaataagcttgaaaggcgccgccgattccagctcctaaacatgctgttaaaaacggacggccaagcggcagcgtgactccgaaaataagcggttcaccaatgccgagcagtcccgatggaagcccgccggcgattgctttcctcagtgttgtttttttcgtcttcacgaaaacggcaaaggccgcgcctacctgtcctgcacctcccatagccaaaatagggagcagaggatcattgccaattgaattgatcagttccatgtgcacaggcgtcaagccttgatgcagtccggttacgacgagaggaaggaaggttgcgcccagaataaagcccgcagcgatgccgccgatgtccaggatggacagtaggccggatgtaatagcatcagaaatgaatccgcctaaaggcataaatacgacatacgttacgattccggtgattaacagtgaaacggtgggtgtgacaatgatatcaagtgattgaggaataaaacggcgaataaattgttcggtgtaagcaatgaatatggctgcgaaaaggacgccgatcagacctcccctgcccgggagaagctcttctccaaataaactgatttttgcgatctccggattgataatcaagatcccggccaaagccccaagtgcgggtgtcccgccaaattctttcgaagcgttaataccgacgagaatgccgagataagtgaacagccctgatccgatgactgtcaggataatcgcaatttgtgagtctgcagagagccagcctgcttgaataattgctttggtaatcccagtaattaaaccggaagcgactagagcgggaataagagggataaaaatgctggcaattttacgtaagaaaagtttaaaaggagtggcatttttccgattgatatcggctttctttttggccgctgcttctttgacatcggcaccttcttctgctgacacgagctttgagaaagcagctgtaacatgattgacgactcctgtgccgaggataatttgtaaggtttcagcttcaacgacccccaatacgccgtcaagctttcttaaaccctgagcatctgctttgctttcatcgtaaggcgtaatgcgcaggcgtgtcatgcaatgcgtatatgaagaaatattggattttcctccgcatagctcaaggattttctgtgcgagatgatggtagttattttctttgctcattaaaacccctccccttcaagatgccttatttttttctcatagattggatggctgctctcgttttatcgatataaccggttgtcgtttcatactgctcagccgccatgcctaaaaacaaaacatcaattataaaaagctgggcgaggcgggaggaagtggccgcacttcgaatcaaggcttcattggaatgggctgtatacaaagggacatcagccagtgcggagacggatgtctgactgaattgtgtgaggctgatcgttgtgatgcctttttccttggccatggcaaacagttcaatgatttcctgtgtctctcctgaaaacgaaatggcgaatacgatgtcgtctttatctgcatttgcaattaaagatgccacaagatgagtgtctgtaaacgcggttgcttgtttatgaatgcgaagccacttttgctgggcgtccttggcgacaatgccggaagcccccaggccgataaaatgcacggtatgagctttgagaagcagagaaaccgctcgttcaagctctttgtagtccatcaggtctgaagtatcctgaatggcttgaatggcattgccggccgttttttcggaaatggagggcagcggctcgtggggaacaatatcccggtagccctgaaacgtaggctttgccagatcgcccgctactctcatttttaaatcttgaaatccttttaaaccgagtgatttgcagagcctgatgacggcagcgtcacttgaattggctaaggcgctgatttcgttgaccgtgctttcgattgctttgtggggatgggctaggatataatctgcaagtttgcgctcggatggagggagcttatgcttcattgattggatgatggctaaaccgcctgtggccattctagttctctccttatcatggatggtaatgttcgattgctttgtcaatgaaaccgtttgcttcatcgagtaatgtctttgcttgtttctgatctgtgcttgttttgagcatgacgattgctgttttgacgtgatgatcggcttgttccagagtgtatctggctgtgtcgtatgaagcgtttgtaaggctttggataatgctgatggcgcgttcttttagttttttgttgctgacgttgacgtctaccatcaagttttcgtaaaccttgccgattttgaccattacagcggtagatatcatgtttagaatcattttatgagcggttgcggctttcatacgtgttgatcctgtaatggcctcaggtccgacgacaacctcaatgctgtgatccgcatccttgctgatggcggaattttcattgcaagtaagggcgatggtgtgtgctccgactttgcgggcgtatcttagggcgcctgcggcgtagggtgtgcggccgcttgctgcgatggcaatgacggtgtcatttgaagtgagctgtatgtttcttaaatcttcagctcctgcttcatcactgtcttcaatgccctctgctgcctgtaaaaaggcttcggggcctccagctatgattccgatgacctgatctgggcttacgctgtaggtgggaggacattcaacagcatccatgacgccgagtctgccacttgtgccggcgcctgtatatatgagccggcctccattttgaaacgattcataagcgcagtctacagctgttttgatgtcggggagaacctcttgaacggctgcagcgactttcatatcttcgttgttgatcattttgaggatgccgagagtgtttgctttgtggatttcaactgtttggctattgcgtgattccgttgtgagacggtgaaggtttaatggttctgacatgaggatgccccctgttttaaaatgatatatctcaatattcagtatattcatttctgttatgatatttcaactatgtttttgaatttttgaaattttatttcactcaagtctataagaaatgatgaaggatcaactgttctccaagcgggccgattcttcgccgtcctttatcaaggaacccgcttttcatataaaggtgttttgcgcgtatgttcagatgattgacggccaagatgatttcgtcgcaccatggaaaatatccgctcacaaaagcgggaagcaaaagcatggcttttttcgcatagccttttccgtgatgcacagcgtttaaagacagggagctgagcagtaaagcaaatggattgttagaataagaagcaagcgtttcttttgatgcatgtaaaatgaaaaaaccgactggaaggtcgtcttttaagatgacaaccgggtatcggtcctgtatgcccagagcctgagacagcacctctttcgggagggaggtaaagcgtttgtcatcgttggtgagcgtgaatgattgaagctcgggcaagtgttcaggcttatagaaggataaagaaatgtcttgagtcatgtggtggcctccttacaatatgtcgtcaagctcgttttccgaaatgacgcggtagcccgcttgttttaacagtgcggcggttactccgctgccggtgatttttttaccagagaatgtgccgttatagataaaaccgcttccgcaagatggactgttttcttttaatatgacggcagaagcgttgatttcttttgcgtaagccaatgttttcgcggcgccttccatatatagttctgtgacgtcttctcctgaagctgtcacgattttcgctgttccattgagaacatcctcgccggtgcctcctatgatttctgcgggttcgcgtggggtagagaagccgccgagaagttcagggcaagccatgactgctttcttttcatcgacgagttttctgattttctccgacgctgcgtgagagccgttatatctgcattcaatgcctccaaggcaagaactgactagaatcatattgggttctcctctcttgctttacttgtctctatcataaaataaatggctttagttgggaggctttttcagttaaaaaaggagttaaaaagtttgaaaataaaaaaattaatttttctctttacaaacagggagtgacctgtatataataacttttgtcagctcgacgagaacacaacggcccgttggtcaagcggttaagacaccgccctttcacggcggtaacacgggttcgaatcccgtacgggtcaccatttggaggattagctcagctgggagagcatctgccttacaagcagagggtcggcggttcgagcccgtcatcctccaccatcttgccggtgtagctcaattggtagagcaactgacttgtaatcagtaggttgggggttcaagtcctcttgccggcactgttttttcaaaattttatgtggaggggtagcgaagtggctaaacgcggcggactgtaaatccgctccctcagggttcggcagttcgaatctgcccccctccaccattattgggctatagccaagcggtaaggcaacggactttgactccgtcatgcgttggttcgaatccagctagcccagtcacagacacctttgatcaaaaggtgtcttttttcttttcgggaaaatcattccaacttctaactgttcagtctgtataataattttaaaaatatgttaaggtagtttattcacgaattaccatctacaccctgccaaaaatttgataaacttattttataaaaaaattgaaaccttttgaaacgaagctcgtatacatacagaccggtgaaggcagaggttagataaatatggaaatgatgattaaaaaaagaattaaacaagtcaaaaaaggcgaccagaatgcatttgcggacatcgtagatatttacaaagataaaatttatcagctttgctaccgtatgcttggcaatgtgcatgaggcggaggatattgcacaggaagctttcatcagagcgtacgttaatatcgacagttttgatattaaccggaaattttcaacttggctttatcgaatcgcgaccaatttgaccattgaccgcattcgcaaaaagaagccggattattacctcgatgcagaggtggctggtacggaaggcttgaccatgtattctcaaatcgccgcagatggtgttttgcctgaagatgcagttgtgtcgctggagctctcaaacacgatacagcagaaaattttaaagcttcctgacaaatacagaacagtcatcgtattaaagtatattgacgaactctcattaattgaaatcggggagattctaaacattcctgtggggactgtgaaaacgcggattcacagaggcagagaggctcttagaaaacaattaagggatctttaagtggggtgatgaaatgagctgtcctgaacaaattgtgcagcttatgcatatgcatcttgatggagatatccttccaaaagatgaacacgtattaaataaacatctggagacatgcgagaaatgcagaaagcatttttacgagatggagaaatccatagcgctcgtacggagcacatcgcatgtcgaagcccccgcggattttaccgctaatgtcatggcaaaattgcctaaggagaagaaaagagcttctgtaaaaagatggttcagatcccatcccgttatcgcagctgctgcggtattcatcattttgatgggcgggggtttttttaacagctggcataatgaccacaatttcagcgtgtccaagcagccgaatcttgtggttcataaccatactgtgaccgtgccagaaggtgagacggtcaaaggtgatgtcactgttaaaaacggcaagctgattattaaaggcaaaatagacggggatgtaaccgtcgtaaacggcgaaaagtatatggcctctgctggacaagtcaccggtcagattgaagaaatcaatcaattattcgactggacatggtacaagatgaagtctgcggggaaaagtgtactcgatgcattcgatccgaacggagaagagtaaagcgcgttagccgctttgctctttttttgtgggctgagagggctggcacatttcacttgctaaatcgaaatgtggtataatgggctcgctatgtaaagtacatatgcgtaacacgtaaaacacaaaatacgaaatgactgaaatcttggaggacgaggaaatggcttttgaggatatcccttttttgcagtacctcggcaatgccgttgatattctccttgtttggtatgtgatatataaattgattatggtgatacgtggcacgaaagcggttcagctgttaaaaggaattgtagtcatcgtgcttgttcgtatggccagccaatatttgggcctcagcacacttcaatggctgatggaccaagcgataacatggggatttttagcaattattattatttttcagcctgagctgagaagagcgcttgaacagctaggccgcggccgctttttttcgaggagcggcacgcctgttgaagaagcgcagcagaaaacgattgaggccattacaaaagcgatcaattatatggcgaaacgccgtataggcgccttgcttaccattgagcgggatactggaatgggggattatattgagaccggcataccactgaatgccaaagtcagctctgagctgctgatcaatatttttatcccaaacaccccgcttcatgacggtgcggtaattatgaaaaataatgaaattgccgcggccgcctgttatctgccgctttctgagagcccgtttatttcaaaagaactgggcacgcgacacagagcggctgtcggtatcagtgaagtaacagacagtttgacgattattgtgtctgaagagaccggcggcgtcagtgtggcaaagaacggcgaccttcacagagagctaacagaagaggcgctgaaagaaatgcttgaagccgagtttaagaaaaacaccagagacacttcttctaaccgctggtattggaggggcaagaaaaatggataaattcttaaacaaccgctgggctgtgaaaatcattgctctgcttttcgcgctcttgctttatgtggcggttaacagcaaccaagcaccgacgccgaaaaaaccgggtgaatctttctttccgacatcaacaactgatgaagcaactctgactgatattccggttaaagcgtattatgatgatgaaaattacgtcgtaacgggtgttccgcaaacggttaatgtcacgataaaaggctcgacaagcgccgtgaaaaaggctcggcagaccaaaaactttgaaatatatgctgatatggaacatttgaaaaccggcacacataaggttgagcttaaggccaaaaacgtgtcggatgggctgacaatctcaattaatccgtctgttacgacagtgaccattcaggaacggacgaccaaaagttttcccgtagaagtggagtactacaacaaaagcaagatgaaaaaaggctattctccggagcagccgattgtcagtccgaaaaatgtgcagattaccggatcgaaaaatgtcatcgataatatttctcttgtaaaagcttcagtgaatttggaaaacgcagatgaaacgattgaaaaggaagcgaaagtgactgtctatgataaagacggaaacgcgcttcctgtcgacgtggagccctcggtcatcaagattaccgttccggtgacaagcccgagtaaaaaagtgccctttaaaattgaacggacaggaagccttcctgacggtgtcagcatagcgaatattgaatccagccccagtgaggtaacggtttacggctcacaggatgtgttggattctcttgaatttattgacggcgtcagcttagatttaagtaaaattaacaaggattccgatatcgaggcagatattccgcttcctgacggtgtcaaaaaaatctcaccgtcaaaggtgactttgcatatagaagtcgacagtgaagcggatcagaagttcgagaatgtccctatcaagactgtagggctgagcagctcacaaaacattgaatttcttgatcctgaatcacaagcgatagatgtaacggctaaaggctctcccacgaatataaaaaagctgaaaaaatcagatattgaattgtatgtgaatgtttcagatttagaggacggggagcatagcgtgaagcttgaagtgaacgggccacagaatgtaacttggtccttggggcgtaaaaacgccaaaatcaagctgacgtctaagaaaagcaatacatcaacgaatgataacagcagcaatacatcagggaaccaggacacagataaacaaacaaatgatcaaaagaacaatcagcaagaagatacaaagaacactgataaaaacaacaacgatcaaaaccaagacgaaaataaagatcaaaaccaagatcaggatgaggatgaatccactgcgaattcacaatcctcatcggaataaaaaaggagcgattataaaatgggcaagtattttggaacagacggtgtaagaggtgtcgccaatagtgagcttacacctgagctggcctttaaagtcggacgtttcggcggttatgtgctgacaaaagacaaacaacgtccaaaagtgctgataggccgcgatacacgcatctccggccatatgctggagggagcccttgtcgccggacttttatccattggcgcagaagtcatgcgcctgggtgttatttctacaccaggtgtatcttatttgacaaaagcgatggatgcagaggcgggcgtcatgatttccgcttctcataacccagtgcaggataacggcatcaaattctttgggggagatggatttaagctttctgatgaacaggaggctgaaattgagcgcctgatggacgaacctgaggataagctgccaagacctgtcggagcagaccttggacttgtaaacgattattttgaaggcggacaaaaatatctgcaattcttaaaacagacagctgatgaagatttcacaggcattcatgtggcattggactgtgccaatggcgcaacgtcatccttggcgacacacctgtttgctgatttagatgcagatgtttctacaatggggacttccccgaacggattaaacattaatgacggcgtcggttcgactcatcccgaagcgctcagcgcgtttgtcaaagagaaaaacgcggatctcggccttgcattcgacggtgacggcgaccgcctgattgctgtcgatgaaaaaggaaatattgtagacggcgaccaaatcatgtacatatgctcaaaacacctgaaatcagagggccgtttaaaggatgatactttggtttcaaccgtgatgagcaacctcggcttctataaggcgctcgaaaaagaaggcatcaaaagcgtacagacagctgtcggcgaccgctacgtagtagaagcaatgaaaaaagacggctacaacgtcggcggagagcagtcaggacatcttattttccttgattacaacacgacaggggacggattattgtctgctattatgctgatgaacactttgaaagccacaggcaagccactgtcagagcttgcagctgaaatgcagaagttcccgcagctgttagtcaatgtgagagtgactgataaatataaagttgaagaaaatgaaaaagtaaaagcagttatttctgaagttgaaaaagaaatgaacggcgacggccggattttggtgcgcccttcaggaactgaaccgctcgtccgtgtcatggctgaagcgaagacgaaagagctgtgcgatgagtatgtcaatcgcattgttgaagtcgtccggtcagaaatgggattagagtaacgaagtctattatcagagagtgaacaagacaagcgaggtttacataagataattgtgagacatacggcaaagttgtttaaaaaacaattgaccgtttatgccacatgttgtaaaatcaagcttgtcttgttcttattttctcaataggaaaagaagacgggattattgctttacctataattatagcgcccgaactaagcgcccggaaaaaggcttagttgacgaggatggaggttatcgaattttcggcggatgcctcccggctgagtgtgcagatcacagccgtaaggatttcttcaaaccaagggggtgactccttgaacaaagagaaatcacatgatcttccaaaaaacatgtaggaggggacgattgaaagtccccttgaaatttgactttcttcgtctccttttacaatcttaggaggaagaaaaatatgtgtggaatcgtaggttatatcggtcagcttgatgcgaaggaaattttattaaaagggttagagaagcttgagtatcgcggttatgactctgctggtattgctgttgccaacgaacagggaatccatgtgttcaaagaaaaaggacgcattgcagatcttcgtgaagttgtggatgccaatgtagaggcgaaagccggaattgggcatactcgctgggctacacacggcgaaccaagctatctgaacgctcacccgcatcaaagcgcactgggccgctttacacttgttcataacggcgtgatcgagaactatgttcagctgaagcaagagtatttgcaagatgtagagctcaaaagtgacaccgatacagaagtagtcgttcaagtaatcgagcaattcgtcaatggaggacttgagacagaagaagcgttccgtaaaacacttacactgttaaaaggctcttatgcaattgctttattcgataacgacaacagagaaacgatttttgtagcgaaaaacaaaagccctctattagtaggtcttggagatacattcaacgtcgtagcatctgatgcaatggcgatgcttcaagtaaccaacgaatatgttgagctgatggataaagaaatggttatcgtcactgatgaccaagttgtcatcaaaaaccttgatggtgacgtgattacacgtgcgtcttatattgctgagcttgatgccagtgatatcgaaaaaggcacgtaccctcactacatgttgaaagaaacggatgagcagcctgttgttatgcgcaaaatcatccaaacgtatcaagatgaaaacggcaagctgtctgtgcctggtgatatcgctgccgctgtagcggaagcggaccgcatctatatcattggctgcggaacaagctaccatgcaggacttgtcggtaaacaatatattgaaatgtgggcaaacgtgccggttgaagtgcatgtagcgagtgaattctcctacaacatgccgcttctgtctaagaaaccgctcttcattttcctttctcaaagcggagaaacagcagacagccgcgcggttctcgttcaagtcaaagcactcggacacaaagccctgacaatcacaaacgtacctggatcaacgctttctcgtgaagctgactatacattgctgcttcatgcaggccctgagatcgctgttgcgtcaacgaaagcatacactgcacaaatcgcagttcttgcggttcttgcttctgtggctgctgacaaaaacggcatcgatatcggatttgacctcgtcaaagaactcggtatcgctgcaaacgcaatggaagctctatgcgaccagaaagacgaaatggaaatgatcgcccgtgaatacctgactgtatccagaaacgctttcttcatcggacgcggccttgactacttcgtatgtgtcgaaggcgcactgaagctgaaagagatttcttacatccaggcagaaggttttgccggcggtgagctaaagcacggaacgattgccttgatcgaacaaggaacaccagtattcgcactggcaactcaagagcacgtaaacctaagcatccgcggaaacgtcaaagaagttgccgctcgcggagcaaacacatgcatcatctcactgaaaggcctagacgatgcggatgacagattcgtactaccggaagtaaacccagcgcttgctccgttggtatctgttgttccattgcagctgatcgcttactatgctgcactgcatcgcggctgtgatgttgataaaccgcgtaaccttgcgaagagtgttactgtggagtaataaatgtttaacccctttggataagattgtctaaaggggtgtttttatgtccaaaagagaaagaacgtctacagtggaaaaatggattaaagaaggtgatgggacaggactcgactatctatcggccatggctatagatttaagatgtttccacattaggtcggtcaatcaggttaaaaggcattaagacttttgcctaactgagttttctaatgttaatacagatataagagagcagttcctcattatgaaacgcttttgatagcagttggaataaagcatgctagaaatccgaaaaccggagagcctattggaatgataacgtgtttttttattgtcaattaataaaggcaaaagaattctagaagtcgcacttacaatgtacttgtgggccttaggttttaaagctcattctttttttattgagtacattccggtttaagttgaaatgattcagtaaaggacacgccataaataaaaggtagcgtatgattgccattctttccatggaaccgatatttctaagatttcatctttcgtaggctttcgattcatattacgtaatatttttatcgaacgaattagacccacatcatcgattggaaaagctgtcgggaacctaaggcagcgcattagaacataattggctgtccaaggaccgattcctcgtattttaattaagtttttttcagcatctttaaagttcattttcattaatttttccctcgataattccccacttgccattaatctggctattccaatgatatattcacttttttttaccgtcattttaatatctgccaggtcggtaggggttaaccgtgcaattcgctcgtacggtgggaacacccaatactttttaccattccattcaatagaatcgccaaatgcttctacaaattgcttctttaaggagtacgcgaaggctaagttaatttgttgccctaaaactccccaacataaagcttcaaataaatcgggaatgccgatcactcgcaacccataaaattttcgggcaggcattttaagtaatggatctgcttttgccatttcataaaatggagttaaatcgttatcaagatcaaaccattcatgaatatattttacaatctcttcccgtttccactgctcaacaggtctagaatcgtttaggaattgaacaatcatttgtttattattgattacgcttacctgcactaaggaccgaatttccccaatggctataacttttgtaatgatattgttctctatttcatacatgcattcatttttttccctggttaggtagccaaggttcgcattcatgtcgaaaatttcaggtaatgtaatgacaataacatcattgacttcatgccatgtcactttttcattctccttatcttaaataattataagaaaactcacgctggttgaaattagtttatcacataataagctttactcattttgttatcttgctattacattctaaccaccttatttttttctatttatgaggttatagtgttagttatcaagaatgctaaacgggagtggattaaaatcgcccaagatataaaaacgtgtgtcgaaaacgtaaattgggattcaagtcaaaatgaattagatgagcattgtaaggaggggtgagataaatgccggatagtatcaataacggacataaagagagccatgatcagagaaccttaaatgatgtagaaatgctaacaaatgaaaagtggcatgcaattataaataatgatgcagcgtacaataatcaatttttctacgctgtaaaatcgacagggatattctgtaaaccatcctgtaaatctcgcgttccgaaaaaagaaaatgtatgtatttttccaaacgcagaacaagctctccacgcaaattttcgcccttgtaaacgttgcaagcccactaatgaaaaaatgcctgatagcgagtgggttgatctaattactgaatacattgataaaaatttcacagaaaaattaacgctagaatcgttagcagatatttgtcatgggagtccgtatcatatgcatcgaacatttaaaaagattaaaggcattacgctggttgagtatatacaacaagttagagtacacgcggctaaaaagtatttgattcagacaaataaagcgattggagatatcgctatatgtgtgggtatagctaacgcgccttattttattactttatttaaaaagaaaactggacagacaccagcacaatttcgtcaaatgagtaaaatggaggaaacgtacaatggaaacaaataaaccaaccctttattggtctttactaatgttcaagaattgggatttttatattgcttcaactttaaaggggcttgtgtttgtaggttcacagaacaaaccaatcgaggaattgttcgaatgggctaagaaacgctttccaggaagtcttcttgttgaagatgatgataagcttgaaccctatgctgttgaaatcactcaatatctagaaggaaagcggaaaaactttactgttccagttgagtacgccggtacgcaatttcagctagccgtctggaatgcactttgtgaaattccttatggacagacgaaatcctattccgacattgcaaatgatataaataaaccagcagctgttcgtgctgtaggtgcggctattggggctaatccggtattaattactgtaccgtgccatcgtgtaataggaaagaatggctcattaactggctatcggggcggatttgaaatgaagacactgctcctcgatctggaaaagcgagcttcatctgaaatggatgttcctcattgaaagtgaatcatctataatgggttggattcttttagaggaaagtaaagaccagtttactgataaacttgacaacttttaaaatttagcatatcttatacgtaacttaataatcgatgcagatgtttatttttccttttaaaatatgtaggcctttagcattcttttcatatttaattttaaatattgataggatgaaaaagtatcctaataaaaaaggaagagaacatgagtcgatttatttgataatcaggactatattaaaggaaatgaaaacatagcataaagtaaagaccaataataaggtagcacttcaaaaaacttcgctgaagttagttgaagtgaagccgacaattttcaggattcaatgatctaacataatcattgaaattttgaagttgtcggcttttttgttggaaaaaaatagagataaataaaaattgaaataaataatagacaaatatgatctgattgaaagatcttttgaccaataatgagttttaaaaaagggagaatttagaatgttagtttcgctgagtttgtcatcattattaacattattttttattatgcttatggcttctgggattagtggactattgtttttacatccgcgagtacccttgagttttgttcgcattcatattgggatcttggctttaccacttttggtttccttactgattcttgccgatagtggtgtgagcggaaatgttggcccttggcacttagattccttagcttgtttaatgactttctttgttcttgcaattggattcatcattcagcgtttttctgtacgttacttaatgggggatcgatcttatcgaaaatattttacgctttttactttcacaacaggagctgcttctatgacatggttaagtggtgatctccgcttgatggttctattttggggagcaactcttgttggtttaaccttacttataaggttaaacagtgcttggcaagtggctagtgaagcagccaaaatttctggccggttatttttgttaagttggttttctttgttttttgcgatgatgtggctttttcatgccacaggtcaatggcagttatcattggttgtaacaaatgaaagtttagctgggctgggagaatgggagagaacagggattcagctattgattgtactggcggtgatcattcctgcagctcaatggccgttccaaagatggttggttgagtctattgttgctcccacccctgtttctgcaattatgcatgcaggtttagtaaatgctggaggaataatactaactcgattttcacctctatttcatggtggtatcgcttcgattattttacttctgcttgctggcatttctgtattgattggaactggaattagtttagttcaggttgattataaacgccagttagtaggctccacgattggacaaatggggtttatgctcattcagtgtgcattaggcgcctatatagcagccattattcatcttattttacatggtttattcaaagctacgttgtttctacaagctggttcagcagtagggcgtcatgaagtatcggctcgcactaatgaaagaacatcctatttatggatcatggctggtcggattttatccttagttataggtgttgctttttggctcactgctcctggagacgggtatcacttaatcagtgcgctgatcttagggtggtcattgtccgtttcttggactcagcttgtcgcttttggagagggccgaattggccgaattgccggcttaactgttttaggaggagcagccctcgtatattttatcattcataaccttttctataagtggctgcatacaaccatttttcaaagtgttcaacctccaatgtcagctgtcatgattgtcgtatgtctcttactatttggcagtgctttaggtacgtgggttgctcgtcatcgttcttccgtttttttcgcggtactctatctttggttagttcgattaggtgaagcaaaaccaaagtcagtagagagtcacccagactaccttaaacaatatatttcataaggagctaatctgagatgggcattacatccgtattaacgaaagataatgtaaaaaagatagatacagatattgatgttcaagaaagggatcttaacgttttcattacatctgccagccgagtgattgcgccactttggcctatttctacatttgctgcacgtaatccgtggatgggacttgaaaaccaaccttttgatcaggttgcaagttggttgaaaaacactcgcgatgttgatatatatcctagtgcgtctatgatccgttcagcaaagaataaaggtgagattgatgaagattttgtggaaatggggctgcagcgttggcttgattcacattcctatcacatcccacgggacgtggcagagcgattttgtcatgctgcattaaagttagatcccctgccttccgaccttttatcatcacatgagctggagaaattagtaagtgaatgtagtggattggatcatatcgagaatgtgtttatgcaaccactaagttcgtatatagagaatcaagatggtgaaaggctagtcaatatactagatcatcatgtcattaagtggagtaaattatatcttgatgactctcaagcaggctggacaatgcctaatcgtgaggaaggtttttatcgtgcttggcagcatctcattcaatatgatccagcacttagtaaaaagcagcgagaaagggtaaaaggttggccgaaagaggcacatttggctttacaggaagctttattcgcactagaaatcccagagtcagaaatccagacttatcttgaaggtcatttactttcattacctggatgggcagggatgatgctttggcgctcccagcaatcgagccacgaacatgcactcctaacagaatatttagcggttcgaatatccatggagtgggctcttataaagccatacttacctttgactaatgaacgatctaagaaaaaaatttcaattgctccccttatagcagcttggattcattggggtgggcttacattagaagaatggtcacagatgacggccattgaacaaaacgaatatttatcatttgcctacagctttgatgagaaacttcgcaagaaactttggttagaagcttgggaacaaacgtacactgatcgattaagccagaagatcatctcgaaacaacgtgaaaccggcggtaaaaaatctgcattagctcaattagcattctgcatcgatgtacgatcagaaccttttcgtcgtcatctagaaaaagaaggcccgtttgaaacgattggtattgctggtttcttcggggtgccgattgcaacttgtgaacttggcagtaaacacagtcatgcttccttgccgatcatacaaaaaccgcaaaataaaataaaagagttcgcagatgaggatgtattcaaaaaatacaatcaacggaagcaagcaattcattctttaagccatacctttaaaacgatgaagcagaatgcgctttcgagcttactactgcctgagctaagtggaccttggcttactctgcaaatggtagcccgtagctttgtgccaagaaaggcgggtcgtttcattcgtaatctccgtgaggcttggttgcgcaaacctgatacaaaactctcgcttcatcatgatactacagaggcagaaatacctgtgggttttactgatgaagaaaaagtgaactatgctcgccaagcattaaaaatgatggggttaacagaaaacatcgcacccttggtcgtgatctgcgggcatggcagtcaaagcactaataatccttattccgcagcccttgattgtggtgcctgcggtggagcggccggtggattcaatgctagagttttagctgctttatgtaatctatcagaggtacgagaagctcttttagctgaaggaattcaaattcctgaggatacggtttttgcagcagctgaacataatacaacagtagatgaattacattggctttatgtaccagagctttccgaagctgcacaagaagcatttgaacaaattgaagccgtgatgccgaaagtgagacatcatgtaaacgcagaacgtctagcccaattaccgaatttccaatcgaagctaaaaaatccgaaggctgaggcaaaccgatttgcggaagattggagtgagatacgtccggaatggggactggctcgtaatgccgcttttattatcggtaaacgtgaactaactcaggattgtgatttggaaggcagagcctttctccataattatgattggaagcaggatgaaagcggtgaactcctagcaaatattattgcaggacctggaactgtagcccaatggattaatttacaatattacgcatcaacggtagcacctcattattatggcagcggaaataaagcaactcaaaccgttactgcaggtctcggcgttatgcaggggaatgcaagcgatttgttagccggactgccttggcaatccgtcatggaatcagatcacgaggcctatcattctcctcttcgtttattgatactcatccaagcacctagagaatatgtagaacggttattaaataatgattcagcatttctgcaaaaagttcaaaatggatgggtccgactggctagtcttgatccagaaggatgttgggaaagctggtaatgatgaatctaagcatttatcaaatggatttgttattcaaaataaaaatgataaacataaggaagaggtgtgctgtatgaatgtaaaccaaaataaaaaagtattatttttgacggatattgaaaacggtttggagcctattttacaagaagcgactaacacttctgcagagaatatgttgactatacaaagctatggtgccggtatttcacatccttatggagaaatcatgaggtctgttatttttgcgatttaccaggaagatgttgaggagatttttgtagtaggaacaaaagataagaagacttccgcaggtaatggactaactcaacttgaaacaatgaaagataaaatacaaacattggattatctttttcaaaattgcaagcctgaatttttaggtggtacggtcgatgaatggctaaatgaaaatagcagtgacaccattgaaaaaagtgttgatatgattcgacatcatcccctagtgccgtcatatgttaaagttagaggtttattcgttcatcataaggatggaaaaccctcaatcgcggagggtcctgatgctaaaacaggtcaagccatacctgatcattgcttgtcacgatgaaatacaggttcaacttctaaacgcacccatatatggagaaagcagttctaaggagattgtatgagcgctaatttaactgattttgtcacgaaaacaatagaggacatgaactcgtttgatcgtgaaaatatggaatttatgaaaaaactaattagaaaagcaattgatttttatcatctaaagtcttatgaagaagttgaggaaacccattcaggaaatgttcgatttttgcatgtccactctatgatggaagaaaatatgttatccaaaatgatagtggtcacaagaaacggtaaaactgatttggatattgaaggtgtatatgaaggatatgttgtaagagaatattaatgagacgaaatcacaaatagaatatgccaatttttttgctcaggagatgtattagatatgaaaaagtctaagggttctattgaatcagagatcagtaagtccattactcaatgggagaaggattatcttgggcgggggtctgtatctgttaagactgatatactgcgggacatgatcatcgtcaatttaaaagggattttaacaccagccgaatatgtagtttgtggatcaaaagagggtatgttatctatcaaacaaactcgttcggagttagttgaatcaggtatagaaggccttaaggatattatcttaaaaataaccggagaaaaagtgaaaagttttcatactgatttaagctcccggacaggtgaacgagtgatggtatttaaattatgtaatgatctagagaaaaatttggaaaagatcttataatctaaagaaaataaatgttaagacggtatggaatttgttgtgaattgaacataaagaactgccgattcttttgttttacaattatggtatcattgataacttttattcatatcctaagcggacataaagagatatcaattcatagtacactgttgtgttattcctgtcgaaagatctaacatccgctgttgttatgagcggatgtttttttacatctattttaaatacatgaatttgatgctggtgattagtcacttgaacaatatttgaaaacatccttgtcacctgccgggtttccccaagtgtttagtgacatgattatgagaccaatttcgtaaagcttgctgataaatttaagcggtgaacaaaattgatatgctgtcttcagtttcatttcacggaattagtcagagataaacctttaattaaatatatccaaaaaacggattgacatatcgaaatataacgatataataatcgatatggaaccaattgaagtattcaaagccttatcaaatgaatcaaggctgcaaattttgcaatggctgaaggaaccggatcgtcattttgcaccccatgaagggattgatatgaacacaatcggggtatgtgtcagtcaaataacagacaaattgaaaatgacgcaatcgacggcttcccaatatcttaccatccttttaagagccggcctaattaaggcggagcgtattggaaagtacacatattacaaaagagatgaagaagccattgggaaacttgctgactttcttaaaacagagatataaaaataaacatcaaaagatgtttatttttacaccatacatatcgacatattacgatgtgtttattttttataataacatatcgataattcgtgatatgtttattaataattaaggagtgaatgttttatgtctaacacttggaaaatttatattttagccattgtcagctttttagttggaacctcagagtacatcatttccggaattttggatcaaattgctcatactctcgggatcactttagctgccgcgggccagtttattaccattttttcacttgtatatgctctttctacacccgtacttatggcgttgacagcaagtatggatagacgcaaattgatgatgtatgccctaggtttgtttgtgttcggtaatgtcctggcttttgtattgcctggttatggatggtttattgcagcgcggatcattatggcgatgggagcaggtgtggtggttgtcaccgcattaacgattgccgctaagattgcatcggaagggaagcagggaagtgccatcgctacggtcgtgatgggatttaccgcttctttaatcattggtgttccgcttggaagaatgatagcagtagcattaggctggaagtctgtatttggagccattgctttgttgggattgatcgcaatggtcgttattttctttactcttccgcatactgaaggggataagcctgtgcctttgcttcaacagcttgctcttttcaaaaaacggaaagtggctatgggattatcaatcactttcttctggctcgggggatattctgttgcttacacttatttgtcaccgtatctcttgaacatctcaggtataaacggcaacttgcttagcggtgttttgcttatatttggaattgccagtttggttggatcaaagtttgggggatatagcaccgataaatggggagtgccctttacactcgttggcgggatgacgttgcatatcgtcacactgattcttctgtcacttgtcactcattcctatatcggagtgttggtgattctcatattatggtcgtttgccgcatggtccaccggtccgacacagcaatttcacctggctacaatagaaccggaaatgtcaggtgttttgcttagcatgaatcagtcaatgatgcaattcgccatggcggtcggcgcaggtataggaggggtttttgtggaaaacgtatcattggcctcgattacctgggttggtgcgttaggggttatgattgccattattgcatcattgctgattttcaattcgcaaccgaaacaagcgctaaaagatatcaatcaataatttcgaaagatctaacatccgctcgttatacaagcgggtgtttttttataggctcaagtagaaggcacactgaagctgaaagggatttttgccgacggagagcagaagcacagcaagttataatatactaggaagggaaataacggtatggcagaagggttctagcgcttctcgcctgtaagatcattactttgaggatgtgtcatcgtgaatcaaaagacgtacattgaaatgagcaggacatcgcagtacatcaacaaaatgagagagtattcagtgctaattgatggggctgagatgggaactatcaaagatggaggaaggctgcgaattgatttaccgcctggtgagcatgttattcaagtgaagattgcttggtgtacaagcccaactttgaggtttactttagcggaaggagaagtgttgaagtttagatgcggaagtccgcttcgaggttggaagttgcttttggcacttttttctgttttgggccgtcctgaaaattatctgtttatcgagcaggaagaagagaaaaaagctttgtggtgactgtatgttactacatggataaatatcgctgaattctgttttgtgaaagtttaattgacataagaaagaatggcagccttctcaatatcgtgctccttagagcaggctgtcaataaggaattctcggttgtcaattttcataaattcattgagaaactaaatactccttaatcaattgccacctgtcacgagcatgcatgatgaactccgatgcaatggctacaaccaggtttttctccggaacacagcaaatcacattcccgccatcgcctagtgctgagtatgagaaaacgccgtcctcatcactcagccaccatagataaccgtagttattggggtttatctctgttgattcgtcaatccatgatctccgaatgatctgttgattgttccaagtaccatggttcaaatatagataaccaaaccgagccatatcccgtggagtcagcgtaagtccccatcctccggttgagttgccgtccgggtacctctcacatgtttaccgaatagatcgtcaaagctgaatgatttcatttcataatgcggaatttctttcatgccgatcggtttaaataagtactcgttggcaaattcgcgggcgcttttgcctgtggtgcgggtgatgatggctgacagcaggtgtacgcctgcggtggagtatttaaatgtgccgatttttcctccttgacccagcataccgagcgtataggcgatccaatctggctgcatgcacatcttatcgagcggttcttgccagtcttcaaatggatagggagctgtcattgtgagaaagtggtgtcttgtttttgtttattaggagtattcgacacattctgggaaagaagcagtgttttccgaataaatccagctccaagaaaccaaatctaataaatggatctataaaaacgttaaaatcaaaagaactaatatatataggctaacgaaagagatatatcattttttgaaaaatagttttgattgcttatagttgacgagtattaagtgaaaacaatccaaaaaagtccctaacctaaattttaaatattaataattagatgcggttagagaaaaataagttaaatatttgaaaaaaatgttgaaaaaagacatataaaatgatattattacctatataagtaattaatttcttaaggaggaacgaaaatgaagaaaaaaattgctgcatttctactattaacaatagtagcgataagcacgataattcctgtcacagtatctgctggaagcggggaaaagtggaactatggttatgacaaaaagaaaatgcaggattacaatgattactaccattggctttatcgtcacaattcgtcaataacaaaaaaaggtataaattatccaggtcgtattgcccaacctaaatattggtccaaattaagactcgattataccggtccttataaagtttcctaccacaaacacgtttacaaatagaaaatttttcaaaagggatttatattataaaatataagtcccttttgcattaagataaataaggagaaaatatgattgaaataaaaaatatgaacaaatcattcaatgaaagaaaaatttttgaaaacttaaatttggttattgaacctggggagtttattggaattattggaaagagtggaaagggaaaaactacactgctaaatataattggcacgttagaaaaagcagatagtggttctgtaaaaatattagatagggatataaatagaaaaagaaataaaagatatttacttagacatcacttaggatttatatttcaaaactatgcattaattgataatgcatctgtgaatgagaatctagaaatcgcacttaaacataagaagatgaatagacaacaaaaaagaactgctatgtcttctgcattaaaagaagttggtttagataactatggtaaagaaaaagttcatactttaagtggtggggaacaacaacgcgttgccattgcaaggctgctgcttaaaaatcctactttgattttagctgatgaacctacgggatcattggatactgaaaacagagatattataatatctctttttcaaaaactacataaacaagagaagacaatcattatggtaactcacgataaagaactaataaaaattttttcaagaactctacaattataaagggggaatagattgtgaaaaaattattattccttctcgttattactacctttatagttgtaagtttcctatcgataaagcaatttgaatatttacagtttcaatcttttaatcataataatgttcatgattcatggaatgttgttatagatgaagggaattctaaaatcggtaaaaaagataattttaaaatgttggaacaaatagcatttgaatctaaagttaatttgcaacgcatatcatatgaaaatgataataataaagataaagtagtgtattatgttgttctctataatgcaccagaatattttaaagatctaaaactaagatatggggaatttttgcaaagtaatagtagttctaatgattttctatctactgttcaaacaaagaataagcatcagataggaacattagagatatttcatagttttgaacctattgaaattaggccaatgattgctgcggaaaaaacaaaagatattaaaggtacctatactgtaataggtgaaaaacatgctgaaaattttaagaaaatcgcattacagcatggtttttcaattaagttatccaaaaatgaagattcacaaagtgtgagtacaccatatccttatcaggaaatgatgtatataagctcattgattttatgcttattaataatgcttacaatattatatgatgtaagtaataactataaagaaattgctgttaggtatatgttgggatgtaatttatttcatataggaatatatctattcagaaaatatattcctatcattataagttccttgcttgttggaagtttaggtttaatattatatttatattggtataatcactatcaacaattcattgagttcgtatattttttatcgaaaaacattgctctgttatcaataatacttacaatcatttttttaataatatggtttagtactggaagtatcaatatcccacaaatgattaaaaataaaaaaccagtaagaatgtttttttatttaaatattattgtgcgctttgtactggcagtttttctattgttaggtttagagcaggggattagcaaatttcaggtgttaaaaagtacggtttcgaatcaagaaaaatggtctttgttaaaacaatattcttatttagggatgatagcttcaccagagcaaaaacaagaaactcttaattttcaaaaagataaagaagagcgaaaaaaaattcaacttttctataaaaaactagaatcccaaggggcgttttttatatatccttcggacttttactcgaatgattcacaaattacatctcaagacataaatccatggggagaagagggaagaaaagtagaaataaataagaattatttatcggttaatatgataaaagatatacatggaaaagatgtggggataccttcctctaataaagatgtaataaatgtgttagtaccaataaaatttaaaatgtataaagaagatattgaaagatcattagcagaagattataaaggtatatacgatataaaacgcgctgctcctgtaaaaataaatattatctatgtccagaataaccaatcttattttacgttttctacaaattcagctcaaaacagtaactataagattgtagatccgattgccgtaatagttaataataaatttgaccctttgatactagctaataatatttctatggggtatggtttttataccaaaattagtgaaggtaaagatcctttcaaaataataaaaagaacattagaggaatatgaattaaacaacatatggagccctgtatctattgcttattcaaatgtcgaattaaaaatagccaatgataaagaagcattacagttaacggctatatattgtggggtatttcttttgttagctgtagtattattaattttttcggcagtttattacttagaaatgaacaaaaagctattatcaatacaatggatatttggttatagcttttttgagaagcattgtttggtctatctctcggtgttggttttctggagtctgacttttatggttagcttttatgtatctggaaatattgcgttattgggtgaaatttccttatggttggcgattttagacatattattaacaagtatattattgattatgagagaatataatgttactaaacaagtcttaattaaagagtgattagtacaaataattgggggtaaacatttttgaaaagaaaaataaaatttcttacgatttgtttagcgtttgcattattatgtctaattatagctgcctattctatctcaacgaataaaccggatgatgaaaataatattaacaaaaatcaagttggaaaaacacaaaaacaagatagttcatattcagataatatggtatctgatcaagataataaatactatgtcatctatataaaacagaagaatggaacaggctcatcatttgtgcctgaaaagcttaatcctggtttcaaaaatgactctgatgattttaacgtaagtatttcctttgatgataaagggaacgtaattaataatgataaggtaattgaagtggaagacttctcactatcaaatactaataagaaaaaaattagaaaaatagttggtacaaataaatatgatgcagctttgaaagaagttgaagatcgagtgttagagactaagaaagaattagaagaaaattccaataattagtaaatatacaattagcagtattgaccgctgtaaataagaggcggtctttttgcttagaattaaatatttactaggtttaatagaaatttattttcatatcgtatccttttcgtattacgtgaaaggagcactatgaaagttgtactgactatagtttaccttctagacggagaataaaaaagagccggataaccggctcggtataagttaaaactgctttgttacgtcgtattcataatctatttttgcttttacgttgctcatcgtcgatctggctgtcgctaatgtattatatttaaaactccatacctttgccacactgagttgatctgacaaagagatatcataagaccctgaagtcgagctgtttacaagagcacggcgccattcgttgttttcgctcgtcatgatcaggtggcgtgtatttccctggcttggtgtttgagtggcggttgtctgaactctggttacaatggcatcacgcggtatcccagattggtttgttaaatcaaccttgatcacgctggagtcagaacctgaggggctaaggcttgtatttcctttattttcagcaatgccgctgaattggaatgttccgctgcctgatttgattcggtcttcaattgaaagtgtaaaatacatgtttccggtataggtgcctcgtgacactttcacataaaaggtatccgtcgtgttttgggcgtctgcatttgcataaataaaagaagaaaacgtattagggttaatgacttctgtcccttgagaaacaggtattctattcttatcataaatttcaattttcatccctgtatacgcgctctggtatgtactcctcacgtatactttttctcccttattagccgtaaaagtgaaataggcttcatcttgaccagcttccagtattgttgtatcgatatttttatatttccaataaccgatcggcattgcggtatcaaatgaattgtttcctgtgatagcagtgactccgacagctgatgccgaatacgtaaaggtgaataagacagacagcataacagcgaatggaataagccattttttcaccatgcaaacaacctccttttatttccatcatacataataacgatttaggtgtaaataaatgttttttgaggttaatatatacattatctttgccgataaaaaagaataagagagaatactcgggagggaattcaatgcgtctgaatcggcaatttatccgcactcagctgatggcacagaacatattgagcaagaatgcgcctgccaaacgggagaatgcgactgaaaatccagcggcagttctggaaaaggcatacagcaggcttaagtcacaatcttcaactgggggaatcaatcagttcaattattctaaaaccagcgtgtcgggaaacagcggggcgttcagcaaagtgtatcaatcagcgaatgatcgaacagtgacagacacaggggaagaaacagtgattcaatcccaaaacccctatgaatctgagagtgatatcagaatcaaaatactagatgaaaaatacagcaggatgaatgcgattaataaaacaaagtctgatccattaggctatattaaggataagtaccaaaattcaaagtctccttatttcagaagtgatctgtcagctgcagaaagacaggccgcttacgataatgaaacagaatggttattcaaagggaaggcgcaaaactataaccttcaggatgctgtgtttcggaatgtcacatttcatggggaagtggaagctgagaatgaaaaggtgtatcagcggggacaggttaaccagcagctgcaagtactgttgaatcgaaaccatattcatattccagaggggacagagctgacgtttacaatcacaccgattgactatcaggtgcgggtaagcgggacagacgatcaggatctgatcaagcaaattgagcaagtgctgcaatctggagacaacagcaaagaactatttttgcacatcatgaaaagccaaagcagtgattcagcacaattttccgaagaggcctatcaaaagtatcaggctgctcgtgagatgtatgaagttacaggctaccatttgaaggatttagaagtgattgatgggcggtacgtcacgcctgagggacgtgacttaatggatgtatataaggaagagcttgaaaaagatccagtgcagaaacaaacggcttcttatgctatatcttactatcgttcagagctcagtaaaatcgcggaagccgggtataatgccattccggatttcatcctatcaattgattacagcaatggatctctgagagatgtgggacaaagcaagagctatgggaccggagataccgggtggcttgaagcattaaagcgtcaaacgggtgtgaattattaggtaagctgttcatgtaggacagcttattttttatgagaatctaaggggtgaattaatcccaatattcaaataattttattatttttatataaaagattttaaaagaagtgaacgattcaaaactctgaacaaaggtgtttgcctgaaaaaaacaattgtattttccagagaaatttattatgatgaaataagtaatttaggagattatataacaattttaagtttgaattttctgattgttatcactgattcatgtgaaggcaagcaggtctgctgttttctcatttatgagtattttgttaggaggaggaagaggagtggcaaataaagaattaaagaggggcctgggcgcgcgccatattcagatgatcgccttgggcggtacaatcggtgttggcttgtttatgggttctgccagcacgatttcatggactggcccatctgtccttctggcttatgcaatatgcggaatttttatcttttttattatgcgtgcgatgggtgaaatgctgtatgtcgagccgagcacaggttcttttgcgacgttcggccatcaatatattcatccgatggcaggttatataacagcatggagcaactggttccagtggattatcgtcggcatgtcagaaattatcgctgtcggttcttatatgaagtattggttcccggatttgcctgcttggatacctggtatcgtggcaatggtgattcttggtgcggcgaatttaatttctgttaagtcgtttggcgaatttgagttttggtttgcgatgattaaaatcgtgacgattatcttgatgattattgcgggaatcggaattattttcttcggttttggcaatggcggagatgcgatcggtttgtcgaacctgtggtctcacgggggcttctttgcaggaggtttctcaggtttcttctttgcactgtctcttgtcattgcagcctatcaaggagttgagctgatcgggattacagcgggtgaagcgaaggacccgcaaaacacgctaagaaatgcgattcaaagtattatctggcgtattttgattttctacattggcgctatttttgtgatcgtgacggtgtatccttgggatgagctcaactcactcggaagtccgtttgtgtctacgttctcgaaaattggaattacggcagcggccggcattattaactttgtcgtgattactgcggcaatgtccggctgtaacagcggtattttcagcgcgggccgcatgctgtatacactgggtgtcaatggacaagcaccgaaattctttaagaagatttcacgcaatggtgtgccgctgtatggcacaattgcggtgctgatcggtttggctgtcggcgttgtactgaactatatcgcgccgccgaagatctttgtctatgtatacagcgcaagcgtgctcccagggatgattccttggtttatcattttgatcagccatatcggattcagaaaagcgaagggtgctgcattagataaacatccattcaaaatgccgtttgctccttttacaaactatttgacgattgctttcttgctgatggttctggttggcatgtggtttaacgatgatactcgtatctccctgattgtaggcgtgattttcttagcgcttgtggtcattagttattatgtgtttgggattggcaaacgcacgcaggccaatttgacaaaaagcgaacaagcagctgaataacgataaaaaagagacattcacggatgtctctttttttatttttcgcgtatggattttccctattttagcaagctatagggtaaagatagcagaaggaaaggtgttcataaaatggatgttacactcggttatttgcgcgaatcactttcgaatcatctagaaaatgaagtctgccagcgtatttgcaagaagatgctggcgaagcgttatgcaaatgaaggggaatttgtaaaagacttagatgataatgaaatgtcttttttgaaccatgtattagaaaaagaaattaagtatgcccagaatgaacaggatcaaaaacgggccaaggaattaaacgaggtgtatgaattactgctttgagaaaggcgggtaagaaatgggagcaattgaacgaagcggatatacatttcagccggagtttagcgttgtccgtcaaaacggagccatccatgtgtaccatcaaggagagtttgtggaagaaatcgaatttgaatttaacggggaatatcccgatcatgatttgattgaagagcttgtgaatcattattgttttgagcatgaaatttagagccctgccgtgcagggctcttttatttaggatgtgatcaggccatactttttcaggatatccacggtgatgtttttggcttttgtgccggaatcatcgacattggtgacaaagacataagagccatgctctgttttgatgaatccgacaaaccatcctaatcccatatctgtcaggcgagttccggttttcccgtagagcgtgtaatgatcgccttcctcttgaatcatcatgcgcttgacggttttcattaccggcttgtcaaatggaagctccttgttagccagtttctccaaaaaagtttcttgttccagcggagatattgtgagcgagctttgcagccaaaactggtcgattcccccgctgatatcctcgttgccgtaagatagtgtatgaagccatgttttcattctttcctcgccgatatctctcgctaatgcctgataataccagattgcggattcgcgcatggccgagccaagcgtatggtcgcggttccatgattcgaattcacgcttgaccccgtcccatcgttttacatcgtattcatctcttacagctttgacctgcaagccgattaaagcgttcacgactttaaaggtggattgcggagtttgtctttgatttgcccgttttctgttatagacaaatgtctgatccttttgtaaatcgtgaagaatgaaggttccatccgtatccttgaattcgtcatcgacattcattctgctgacattcaagtgtttttcatgagcagatgatgctgcgtggacggagaagccgccgatccctgcaatactcagcacaagcacaatatatatccattttttcattttgttctcccctttgttttgattaactaccttttctctctttcgtttgttcttcctttaaaaaataatcaaaaagcgcttaaatttggttttgtaaacaaatactgttactgggtttatagtcggaagataacgtgaaaatagagggtaaaaaggaaggcagggtaagcggatgaatgagcagattccacatgacaaaagtctcgataacagtctgacactgctgaaggaagggtatttatttattaaaaacagaacagagcgctacaattcagatctgtttcaggcccgtttgttgggaaaaaactttatttgcatgactggcgctgaggcggcgaaggtgttttatgatacggatcgattccagcggcagaacgctttgcctaagcgggtgcagaaatcgctgtttggtgttaatgcgattcagggaatggatggcagcgcgcatatccatcggaagatgctttttctgtcattgatgacaccgccgcatcaaaaacgtttggctgagttgatgacagaggagtggaaagcagcagtcacaagatggcagaaggcagatgaggttgtgttatttgaagaagcaaaagaaatcctgtgccgggtagcgtgctattgggcaggtgttccgttgaaggaaacggaagtcaaagagagagcggatgacttcattgacatggtcgacgcgttcggtgctgtgggaccgcggcattggaagggaagaagagcaaggccgcgtgcggaagagtggattgaagtcatgattgaagatgctcgtgccggcttgctgaaaacgactcccggaacagcgctgcatgaaatggcttttcacacacaagaagatggaagccagctggattcccgcatggcagccattgagctgattaatgtactgcggcctattgtcgccatttcttactttctggtgttttcagctttggcgcttcatgagcatccgaagtataaggaatggctgcggtctggaaacagccgggaaagagaaatgtttgtgcaggaggtccgcagatattatccgttcggcccgtttttaggggcgcttgtcaaaaaagattttgtatggaataactgtgagtttaaaaagggcacatcggtgctgcttgatttatatggaacgaaccacgaccctcgtctatgggatcatcccgatgaattccggccggaacgatttgcggagcgggaagaaaatccgtttgatatgattcctcaaggcggggggcacgccgagaaaggccaccgctgtccaggggaaggcattacaattgaagtcatgaaagcgagcctggatttcctcgtccatcagattgaatacgatgttccggaacaatcactgcattacagtctcgccagaatgccgtcattgcctgaaagcggcttcgtaatgagcggaatcagacgaaaaagttaaattaaaaagctctcttcctttatcgaagagagctttttgattacttctttttttcatcgtagtattggacgggatacatggagccttctgataccattttgttgtcctcgatatcttgcgggtccgggtggccggctttatcaactgggaacgtttccatgtctggctgttttgttattttcatcttcatgctgtgaatgaattctcttgccttttggcgatttgacgggtcttttaatagataagaagtgatgccgacagttgaaacagcgagacctgaaagtaacagcttttgtttcatggtgatactcctttctattttaagaatagtgtttcctgtatcattcccgttttggaaatagctaaacctattgtgtttttatcgtttggattaacagtaaattccatttaagaagaaactagtgacttcattcctgtattggaaggtaatatacattgacttattatcgtttcagtcaaaattcgataaatattgacaaagtaaagtaatcagaataataatataattagtaagagaatgtcatcatacatgaaaggtgtttacgatatgaatcaattgcatcgaagaatgggaacgttttccctcatgatggtcgggctcgggtcgatgatcggttcaggctggctgttcggggcttggcgtgcggctcaaatagcaggaccagctgctattatttcatgggttattggaatggtcgtcattttatttattgctctttcttatagtgaactaggttctatgttccctgaagcggggggaatggtaaaatatacgcaatattcacacggttcgtttatcggttttattgcgggttgggccaactggattgcgattgtgtccgtcattccggttgaagcggtggcctccgttcaatatatgagttcttggccatgggaatgggcgaaatggacaagcggtttggtgaagaatggaacgctgactggggaaggactagcgtttgcctctgtattgcttctcatttattttctgctgaactattggacagtcaatctattttcgaaagcgaattcattaattacgatttttaaaattattattccgggtcttacgattggagctttgctgtttgtcggattccacggagaaaactttactggcggtcaaagcattgcgccgaatggctgggcaagtgtgctgacggcggttgccacttccggtatcgtttttgcgtttaacggtttccaaagcccgattaatatggcgggtgaagcaaaaaatccggggaaatcaattccgattgcggttgtcggctctcttttcgttgcgacagtgatttatgtcctgctgcagatcgccttcatcggagcggtgaatccttctgatattgctcacggctggagccatttgaattttaattctccttttgctgatctggcgattgcgctgaatattaactggctagttattgtgttatatgcggatgcatttgtatcaccgtctggaacagggattacgtatacggcgacaacgtcccgaatgatttacggaatggaaaaaaacaaatacatgccgagtatattcgggaagcttcatccgatttacggcgttccgcgacaagcaatgttctttaacttgattgtgtcgttcatctttttgttcctgttcagagggtggggcgtattagcggaaattatttccgttgctacgttaatttcttatatcaccggcccgatcacagttatgacattgagacggacggggaaagacctgtacaggcctcttcgtttaaaaggcttaaacgtgattgcgccgcttggatttatctttgcgtcactggtgctgtattgggcgcgctggccgttaacagggcaggttctgtttattatcctgatcggtcttccgatttatttctattatcaggcgaaggcgaaatggaaagggtttggccggaactttaaagccggcgtctggatggtgttttatctgctggccatgatggtcatttcttatttgggcagtgataaattcggcggcctgaatgtcattcattatggctgggatatggttctgattgcgatggtatcacttgtattctatgtgtgggcgctgaagagcggctaccagacagaatacttaaaggatgcgaaagagataaattctcagctgcttaatggacagtcagaagctgctgccggaaaagaataaaataaataagaaaaccttgcgatagttgtcgcaaggttttttgcttttaataacccttttttactttgtggaaaagatcaggatagttggtgaacactcctgttacgccccaatcaagcaggcgatgcatatcagcttcattattgactgtgtaaggatgaagcaggaggccgtggctgcggatcatacggacgttttcttgatttaaagctttataatccgggcccgcaccgacagcgtatgttttgatttcttccagggcagcatctgtcattgacgccatttgtttggcttccagcaattgaacggtcggcaggtttggctgtaattgatggatttttaccaggctttctttgctgaacgattgaatgatcacctggcctggcttagaatgcttccccagtaatttatgtttctgcaaagaagcgatcagtttttcttccatacctgggtaggtgtcaggcgattttgtttcaatatagtagttcgcgtgctttccgaaacggtctaatacctcttctaatgtaggaactttaaggccgacgtactgcggctttgctttttccggataggcttcattaaaccaagaaccggcgtcaagcttcttaatgtctgcgagcgtatggtctttcacccagcccgttccggttgtggtgcggtccagtttttcgtcatgcatgacaatcaatttcccgtcttttgtcatttgcagatccaattcaatataatcagccttcattttctgagcggtttcgtaagacagaatcgtgtgctcaggcacatatccagaagcccctctgtgcgcgacggtcaggatacggtcaggtgacagcaggtttccttttgacgctgccgacactggcgttaccataaatgagagtaagcccagcgacagaacaaacaaggccagtattctattttttctcatgatttctcctccttatagataagcactacctgtctttcatattaaaaaacggatgtaaacggcgtgttggaaaactattaatcttttatgtgtctttcttaaacatgctctgcccgttttcctgtattccacgtcaaagccaagaagacgatggcaagaatacaggatgagatcagcatgataaagccgccgttccagttaaaacggtccacgacaaagcccataatggcgtttgcgaaggcggatccgccgatgtatccgaaaaatccggtcaaaccggctgcagttccggctgcttttttcggtgctagatcgatcgcttgcaggccgatcagcataacaggtccgtagattaagaagccaatgctgatcagggcgatattgtctacgagcggattgccggccggattcagccagtacaccaatacggcaatgaaaacacccgccataaacaaaacgcctgccggtgcccggcggcttttgaagaatcggtcactgatccagccgcacaagatcgttcccggtatgcctgcgtattcgtaaagaaaatacgaccagcgtgagtcttcaggagaaaagcctttggcttctgttaagtaagtaggcgcccagtcaaccacgccgtatcgcacgaaataaacaaatacattggcaaaagcgatgtaccaaagaaatttgttgttcagcacatattgaaaaagaatttcttttgttgttaattctttttcctgatttttaaaagcgtgttttggatagtcattccgatactcttcaattggcgggagtccgcaggattgaggcgtatcacgaaccaataaaacaattaaaaatgaaatgataatggcgatgatggcagggaagaaaaacacgcttttccaagtgacgaacatcgcgatcccaagagtcacaagcggagcaagaataccgccccctatgttatgggcgacattccagatcgacatttttgtgccgcgttcacttatggagaaccaatgggccatcgtcctgccgcatggcggccagcccattccttgaaaccatccgttgataaacataaaaataaacatgatggtgacgctcgaagtcacccaaggcattgaaacgaatagaatattaacgattgctgataaaaataggcctgtcgccagaaaatatctcggattacagcggtcagacaccattcccatgatgaatttgctgaagccgtacgcaatggacacagcggccagcaccaaacccagttctgttttcgaaaatccctgttcctgcagataaggaatggcaaaggcaaagtttttccgcagcaggtagtagcctgcgtagccaatgaaaataccaatgaatacttgcagtctgagccgtttgtatgccgcatccatctttgaatcatccagtctctcaatatgaggagccggtttaaatatattaagcattaaaattatccccctttgctgtttgtgctggatgtgtggcgtgcctcctttcccgaaaaacaaaaagagccagaaaacaccccttgtcaaaaggggttggattcctggctctcctcatctccatccaagctattaacttatcatgatagcgctttcttaaattatcatagtccggagcgaatgtaaacgggtaattttcaaattgggccttagggaagtaaatattatccttttactaaatgcagttatgtttttttactagtaacataaaaatctggagggaggctgtttaaaggtggatgaattagatatcgcattctttattttaccgttaggaattatgctgctatcgattgtcgggacctgtatttgtaaaaatccgtatctgatgccaatgcttagtttggtgatttctcttgtgctcacctttaccatttttattgaatcatttttgggatgggctgttgtctatagcttggtttctctggctttatcctatatcacattgattgtggtaaggaaaaggaaggaatcaggaaattaaaaagacctcactttctaacatatcgttgactaaggcaactatatgtgattataattggcttagtcaacaatattagaaagtggggattgatttgaaaacaagagaatcatctgtcggattaaaattcagaaagttcaatcgattttatacaaacgtccttggtttccttaatgagcacatttacgacagcccgttttccttaacagaaacacggattttatttgagatttataatacgcctaattgtacggcaaaagctcttcaggataagctggggcttgaccggggatatgtcagcaggattgtgaagcagtttgaaaaagaagatttgatctataaacagaggagcaaagatgacgcccgccaccattatatttttgtcacagaaacaggaaaaacgatttataaaaagctggaggagaaagccaacgaacaagtagaactgatgctgaatgaaatcaaccaaaaggagcagcacaagcttgccgaggcgatggcagagattgaagcgatcctttcacagtcgctttctgccagatcatcagagatatcgattagagattattttctctcggaggatcttcaactccttattgagaaacaaagacaattttacgcggaggctcacggttgggatgacacgtttttagcttatcttcaggagacatttgacgctgaaatcgaaaaaatatggattgcggaaagcggcgggaaatttgccggctctgtcgggttggtcaagcatgatgaaaagacagttcagctcagatggtttctggttgattcggattttcggggcagggggctcggcacgcaattgctggagcatctggttgcatactgccaagacatgaagtttgaccgcattttcctttggacggtgagtaccatggctgaggctcgtccgctctatgaaaaatttggattcaagataagtgaagtgaaacaagaagcgccattatggggacagcagctgacagaagaacggtgggatttggagctgtcatgaaaagactgcattatgcttgggtcatcgtctccgtcaccttcttgatcttattggcggttcagggggtgcggctgtcatttggtgcgtttgtggagccgtgggaacggcagttttcaatggatagaagcaccatctcgctgatttcgacgatgagttttattgtttatggcatatcacagcctgtgattgggcggcttgtggacaaatggggtgctcgggctgttttggcatggagtgcgttactgacaggagtcagcattttcttaacataccttgtgacttcgccttgggagctgtttttgctttacgggctgggtgtctcgcttggagttggcggagcatcgaatgtggcggcaagtgtattggtcgtcaattggttcagcaaaaatcggggactagcctttgggatcatggaagcaggctttggcgcggggcaaatgcttctcgttcccggctcactcatgttgatccattggtttagctggaagctgacggttgtggtgttgggactgctgttaatcgtgattgtctttccggctgcgctgctgatgctgcggaacaatccttcagaaaagaatacagagccgataggcggactggctgcatcagaaaaagaaacagcacccaaaacaacagctctttcagtggccgggatgtttcgtatgaggcaattctggttcttgatttttccgtttttgatctgtggttttacgaccgtggggctgatggatacccatttgattccgttttctcatgatcatggcttttcaacgacagtcacgagtgctgctgtcagtctgctggcaggctttaatattgctggcatcttgctgtccggaattgtagcggatcggtggagcagccggaaaatcctgtgctttttatatgcggtgcgggcgctgtcgatcgtgattcttatttacagccacgagccctacttgcttttaacctttgcgattctgtttggattagtggattttgcaacggtagcaccgactcaaatgctcgccacccagtactttcaaaactactcgatcggcctcatgattggctggctgtcactcgcccatcagatcggatcggcactaggtgcgtatgtgcccggcgtcatctatacggtaacgggtgagtatacactggctttttatttgtcgattggaatgctcgtgcttgcgagcgtaatgaatgtgatgctgagggagcctgcggcggtcacgcgtgacagtgcgtctgtggtagacaagtgatgaggacaaagggaaagcatctctgatttcgagattattcagagatgctttttttgtatttttgttctaatacgaagtcgatcataccgactatgcgggcgttttcggatttttgtttgaagcgttctgaaatttgaacttttcttgaaaatgggtaaacaccaaatacccatattaggccaattaacacaaaaaacatttgtacacccatttctattaaatcattataatgagaactgaaaaaataaatatataacgttattaatgttactgtaaatacgattttgacagtgtgtttgaatgtgagctgtggttcaattaaacacaatttcatttggttaagtgtgaaagagtcttgtttcattaggtacgaaagtaaatcattatcgttttgactgatagggtacaagtcagtttctattttttttgtgatctcctgatatttatgtatattacttttcatacagtatccccccttttttaagaagaactccatgaatccctacaggactcatggagaaacaatattatttaaaaagtgctaaaaatgtacggaagagtactgcagcagctcccatttcaggacctaccgttaatactaatgcaccaataccagcaacaattaagatacctgtacctaccacaagcatgttgttgacaatagtatcccaatctggtgagtatacttcctcagtatctggtaaagtaaagtgcttctgttttattttaaacgtaatcgtagtcgttagtccagttgtgatattgtcaccgactggaatatcaggtgtatagattttaatttgaatatttaaagattcagctgttggatttacataaacctccaaataaccgttgcgtactgataagctgagactatttaaaaggttttgataagagtcgatttgtgacgcagtaagagacgtttgagtgtcgcccaataaacccgtgatataggcacctggtttaccatttgtaatggtaattgtgtttggtgaaccttcacttggtatggttgccaaaagtgaagttgatagaataatatccaattcaggtgatgtgaaaatggtttctgtcgtatcaaattcaaacatcgcgtttgccaaacttgttagattttctaaagccggaatggtagataaaatgtctgtcagtgtacgcagccttgcatcatataccggatcagacggcggatttacattgcttgcacctgagtctcttcctgaaaatccgtctttatcaattccgatgcttccagaaccgcttccgatggttccttcataaaattgatcaaaggcccagttgtttggcataggatagccgagattgccgctaaatcctgttgacatatttgccacaaaactatactttgtcagttctgcttctgatgtacggatacaaatgtttcttggtccgtaaacccctatttcatacttaggtgcggttgaaaatgtctgcatttttgtaaatgctgacttaatctcttggaaataaggaatgattttatcggtcacttcataatcgtatgcatcaaaatcgacagcgaaataaatggtcgtgcctgacggaaaacctaatcttctagcaacagaagcggcactatatgcatctcttgtgccttggtctttgacaaaataagaagattcatagccgccgtcttgataaattgggaaaaccttcaatccggcatcaagaataactgcaagctctttagatgtcagggcttttgatgtgaggccgctgcttgtccgcacatttccggtcaaatatctgccaaccgttttataaccgttattccgcagtgtttgagctttttctgcggttataattgtagcagtgtcacaagcagaagcggcgcgagttgtgtctcctgagcttgataataaagctttaatggttggcatatctgcataacctgtttgcggcaggcacatgaactcttgaaatgctttaacagctgaaacaacacccacaccatatttgccgtcaaactcaccaggatcgaacgattttccgttacaatagagggcgtactgaacaattaagacaaatcctgttcttgaatcgccgggagttaaagtaggacacaaacttgtggtgccgtttccgaaaaatccattggcaacacttgtgctcatgccttcttctttttgcagggcataaataagagctttatttgtatcgcggccatacagtccgtcacaaggcattaacccgatatagtcattgtagtcccgatttaagttttgttgaatctggcgaattcttgaatcacccccagacaccagcttaaaagcgctcatgtctaataaggctttcataattaacgtggtgacaatcccatcctgtgttgtcagtccggcagctttttgaaattcttttaccgcattttctgttttttcgtaaaagacgcctgtaaaaccgccgggattaaagcctttacaccataaagccccttgtaaaataaaattcatgttgcttggttttgaatctggagcttggcgtttaagaggcttaaataagcgctgtgttgtcggcccgaagttatcggctggctctgagatacccaattcaatttgaagcgcccgagtcagaccgtagatcgtatcccacccagttttcccgctttcttcaactgggttatacccatgtttgccgctgtacgtatcgttcagccattgctgtgtgattaagaccatttcatcaaccatttcgattcctcctttgttagattgcgttcatttataggtggcaaacgtaggacaaaataaaaaaatggatgccgttaagcatccattttacatccgttctccaacagcttcgctttcggtttcagctctgaaatgtagaggcctaaaagtgtaagcgcgcctcctagaagagcgatccatgtcatgttttcgtgcagaatcaggacagaagcggcgatcgtgataaccgggaccatgtaaatatacgcactggatttgacggctccgagcacgccaactgaataattccaagtggcgaagcacagggcagaagcgccaattcctaagaaaagcatgttgagtatatttgaagcagatgaaaatcggcttaggtcaaaatggaagtcgaacaaaaataaagcgggaaccataaataataggccatacaaaaatactctctgtgtcaactcgatgatgtggtattcgtaagcgcttaattttttcatgaatatcgagtatccgccaaacacgagagcagccccggctgccatgatgtctccgagtggatttagacgcagtactacattgccgttaaacgtaatcaataaaagcccgatcagtgccgagacaaatccaatcaaaaaagtcagacgcagtttttcgccttcgagcagaaaatgggccaaaaccgcagtgatcatcggtataatggacacgatcatgccgacattggaggcgtatgtataggtgagagctatattttctaatagaaagtataaggttacgccaaataaaccagccccggcaaacaacagctcctgccgccaatttctgaacggaatcatgttggggcggacgaggataagagcgataaagcccatcaaaaaccgataaaataatatttccattggagagaagtcagccagcagaacttttgtcgaaataaaggtcgtcccccaaatcagaatggtcacaatggctgcgatatgccccgaagtttctctttgtatgttcatctgtgaagctccttttcaaaaatcttcatgtattgcttcggcgtcagccccacctgccgtttaaaaaacttcgtcatatggctctgatcgctgaatcctgtctgaaatgccgcatcaatcggccttaccccttgttcaagaagttttttggcttgattaatccggattgtttccatgtagctattaggagtaatgcctttttgttttgtaaatgaacgcaataaatgatacttgctccagcctgttaattcactcaaatcattgagtgtaacattttcggcataatgctcttctaaaaattcacaaaccattttgacttcgtctgatggttctggaacgctgctaaggaacgtgacatctgaataatggcggatcagctcttctaatagatgaagaaacagctcctccttacgcaaagcttgtttttcctcggatatcaaaatatgcaattcctgcaggctggctgtcagctcatggcggaataacacatgctgggagaaataagggagatgcccggcgccagtaatctctttcaccgccttctccatgatatccggcatgacattgatacaccgataatcaagcgtccggccgtcaatctgttcacagctatgcgtgtcacgggggttaaagaggagaagatcacctggattgatgatatattcttgatcctggcaggccagataccgttgccctttttcaataaatccaatcacataataatcgtgaaagtggttcgggaacttttgcataattcccttgaagcggtaggcttctatatgaaggtgtgggtcaagctgcagtgtgcgggtttcgttttgcatgggatgcctcctgtcggtgtggtggtcttggattaagtgtagcatgattttgggggatttcttgtatgatgttgctgtttaggaatagagaaagcagaccgttatttgtctgctttcgtttaagaatttaaaagattttaaccctcaataataattttatcttttttaataaaaatttatttttcaaatatttcagttataatggtttggaacagataggaggggcaaagatgtatcaatcaaagaaggttttattgttaggttcaggtgaattaggtaaagaggtagtgattgaagcccagcgtcttggggtacagacggtggcagttgacagttacgagcatgctccggcgatgcaggtcgcgcataacagttatgtcgttgatatgctggacccagagcagatcagaaccatcattgagaaagaaaatccggatttgattgtgcctgaggttgaggcgattgcgacggatgaattgctgaagcttgaagaggaaggatttcacgttatcccgaatgcccgtgcggccaagctgacgatggatcgggaaggcatcagacgacttgcggcggaaacgcttggacttgcgacagctggctatgaatttgcgaatacatatgatgaatttatacaagcggcagctcagatcggttttccttgtgtcgttaaaccattgatgagttcttctggaaaaggccaaagtgtgtgccgctctgaagcggatttagagagctgctgggagacggcgatggaaggcggacgggtgaaaaacggccgcgtgatcgttgaggagtttatccctttcgaatcagaaatcacactcttaaccgtacgtgcggttaacggtacggcattttgtgagccgatcggtcatgtgcaaaaggacggggattatatcgaatcgtggcagccgcatgatatgacagagcagcaaatagaagaagcgaagcatattgcgaaaacgatcacggatgagcttggcggatacggcctgtttggtgttgagctgttccttgcgaaagatagggtatatttcagtgaggtatctcctcgtccgcatgatacgggtcttgtcacgctggtgacgcaaaatttgtcagaatttgcgctgcatgtccgggcgattctcggctttccgattacagaaatcacacagctttctcctggcgccagcaggcccctcaaagcgccggaagaattagcggattacactgttgaaggattggaaaacgcactggcagtcccaaagactcaagtgcgcgtctttggaaagccgataacaaaagccggacgtcgtatggcagttgcgctttctgctgctgattcagttgaaacggcaagagagaatgcaaagaaagcgttggaccagctaattttaaaatagagtttgaacaggtcttgtcatgggacaaggcctgtttttttctttctccgtaaaagttttatcataagaatcagaaacctgattataatgtaaaagtcttccatcgatacgggtggttgacactaaaggagggagatgacaaaatgaaattagttccaagattcagaaaacaatggttcgcttacttaacggttttgtgtttggctttggcagcagcggtatcttttggcgtaccggcaaaagcggcagagaacccgcaaacttctgtatcgaataccggtaaagaagctgatgctacgaaaaaccaaacgtcaaaagcagatcaggtttccgccccttatgagggaaccggaaaaacaagtaaatcgttatacggcggccaaacggaactggaaaaaaacattcaaaccttacagccttcgagcattatcggaactgatgaacgcaccagaatctccagcacgacatcttttccatatagagcaaccgttcaactgtcaatcaagtatcccaacacttcaagcacttatggatgtaccggatttttagtcaatccaaatacagtcgtcacggctggacattgtgtgtacagccaggatcatggatgggcttcgacgataaccgccgcgccgggccgcaatggttcgtcatatccgtacggtacttattcaggcacgatgttttactccgtcaaaggatggacggaaagcaaagacaccaactatgattacggagctattaaattaaacggttctcctggaaacacggttggctggtacggctaccggactacaaacagcagcagtcccgtgggcctttcctcgtcagtgacaggattcccgtgtgacaaaacctttggcacgatgtggtctgatacaaagccgattcgctccgctgaaacgtataagctgacctatacaaccgatacgtacggctgccaaagcggctcgcctgtttatcgaaactacagtgatacagggcagacagctattgccattcacacgaacggaggatcgtcatataacttgggaacaagggtgacgaacgatgtattcaacaatattcaatattgggcaaatcaataaatacagcaaactagccatattcatgtctattttgtttttatgcgggtgcagttcgcagacgcattcttctcaaaaagaaacgactattcctgtcactcttcatgtggaggatgctaaggggctgccggtcgaaggggttcaagtgacgattgtcaaagcgccctcttcagatgaggagccgagtacagagattggcgagatactcggtaaaacagacaaaaacggagatatcaaatgggataccggcagaaaaggcgattactcagtcgcgttgacgaagggtgaaacatcagtaacccatcacatctcgttaacagaggataaaaaagatcatgccattccattagtcttcaaagaatagcagtttccttgattttaagggaactgccttttttatttattgcaggaaaccaaactatatactggaaatttattatgtgagataataagaaataggtattttttcttacgagacaaaaggggcgttatcctttatatcaatcaaacccggaggaaaaagaagaagatgatacaagattcaatgcagtttgccgcggttgaaagtggtctgcgcttttaccaggcatatgatcaaagcctttctttgtggccgattgagtcggaagcattctatgtttctactcgttttggaaaaacacatatcattgcaagtgggccaaaggacgcaccttcgctcattttgcttcacggaggccttttcagctctgcgatgtggtatccgaatatcgcagcgtggagcagtcaatttcgtacatatgcggtcgatataataggagacaaaaataaaagtataccatcagcagccatggaaacgagagctgattttgcagaatggatgaaagatgtctttgattctcttggacttgagacggcacatctggccggcctttcgcttggcgggtcccatatcgtgaatttcttactccgcgcgcctgaaagagtagagcgggcggttgttatcagtcccgctgaagcgtttatttcatttcatccggatgtctataaatacgctgcagagcttacaggggcaagaggagctgaatcatatatcaagtggatcacaggcgacagttatgatctgcatcctttactgcaaagacaaattgtggcgggcgtggaatggcaggatgagcaaaggagcctgaagccgacagaaaacggctttccgtacgtgttcacagaccaggaattgaaatcaatacaagtcccggtacttctgatgttcggtgagcacgaggctatgtaccatcagcaaatggcctttgagcgggcttcggtattggtgccgggaattcaggctgaaatcgtaaagaacgccggacatctgttatctctggagcagccagagtacgtcaatcaacgcgtcttgtcctttttatgcgggggataaaatagtaaggaacatgaaaagattggcattcatttttcaaaaggtaacaaatgttgtataataatagaatttgaatgctgctttttttgggagcattctatgttatcatgcttattggagaaaaatttttcctgtaacgctattcgatcactatcgtcaaataatatagatggttttacaattggaggtttggttacactgtgaattacatcccctgtatgattacgataggaaacttcatttgcggattgctggcgattcattccttgctatatcacaacattcattcagcagtgctttttatttttacaggcatgttccttgatttctttgacgggatggctgctcgtaagctgaatgccgtttctgatatggggagagaactggattcgtttgccgatctggttacgtttggggtggctccttctatgcttgcttacagtgtcgcgttgtataccctgccatttatcgggatcttatgcgcattgacgtacagcatttgcggaatgcttcgcctctctaaatttaacattgaacaaagcaagctcccgacgtttatcggtatgccgattccgtttgcgggcatgtgtctcgttattttaagcttcacctataacccgatccttctggcaatcggcacttgcggactctcatatttgatggtgagtaaaataaaattccctcattttaaaaaacatgcggcagaaaacctggagtctgggagatggaattagttcagcagctcatagcggattacggttatctcgctatttttttgatgctggtattaggaattgtaggattgccgattccagatgaagtgatgatgaccgttgttggctatttcacgcataccgatgtattgaattatgagctttcgatattgattagttttgtcggggctttgttaggtatgctgatcagctacatgattggcagaaaagccggacgcccgtttattgacaagtacggcaagtgggtcggcttaaaagaaaaaagaatgatgaaagtggaaaaatggatgaagaaatacggtccatattctcttattttaggttattttattcccggcgtcagacatgtgacgtgctacttttcggggatcggcaaaatggatctgaaaacgtatgttgcgtttgctgcaatcggcgcctttttatggtgctttgtttttattacaatcggaagggttatagggattattcatgtttaatacggctgtaaagattctgtatcgatcattgatagagctgacgaatcatcgtttgtcatcctatctgattaaaggattttgcgagtcgaaaatcagcaaaccggtcattccgcttttctcaaaacattttcggctgaattgggatgatgtggacggtacggctgctgattacggatcgctgtccgaattgttcattcgacaaataaatctggagcggcgccctgtgtcaaaagaggcgcatgcggtggtcagccctgttgacggtgtggttcagacggtaggaatcatcaacccgaatcaaacctttacggtgaagggaaaagattactcattcgctgagctgaccggctgtaaaagcgcagaccatcaatacaatggcggttacttcgtcgtgctgtatctaagcccgaggcattatcaccgtttccattctccgatcagctgcaggtatcaaaagctggccgagcttggaaatcgctcatacccggtaaatcaactaggcttaaaatacgggaaagatgtgctgtcgaaaaattaccggtttgtgtacgagctgaatagcggcagccgaaatctcctgatgattcctgtcggcgcgatgaatattaattctatcgtgcagacgaatacccgtactgaattggagatcggcgaagagctgggatacttttcatttggctcaacggtcattttgatttttgaaaaagacgcgttccagccgtccgcccatttagcagaaggccaagaagttcaagtcggagaactgataggttatgaagagtaaaaagaggagcttgcataaacgcagcgcctctttttttgaagaaaggtgagacttatggagaaacaaatcatcagctggattacagattatcagaacaccggagatgaagccgtcctgcggcaagtgcgagaagtgtgctggccgatcgttgaagcggttttgcatgagaaggcaatagatgatgaacaagcgaacaatttacgcgacaaaggaatcgagcggtttccattcatcatcagcaaataccaagcggatgtgcagcttccggttgagacatttttacgaaatacgtatcggttttactttcatcaggtgatgagagaatccagctaaagcttctttcaacagagaagcttttttttgttggcaggaaaaggaaactttttctatatctatctcgtaatgactagagaacctagcagaaaaggagagatagaattgaaacgaatgatagtgagaatgatcctgctgctgctgattgtctgtctggcgttttcttctttttcagtctcggcacgtgctgcttctgaagaaaaacattgggagcgctggattgaacgacatgcacagccactggatgcttccaatgcttcaaacaaagaccttcactttctgaagaaggtgctgaaaggaaaacgaatcgttcagttaggagaaacgacacatggcgctggcgaaatcaatgccacaaaggtcagaatgatcaaatacctccacgaagagctgggatacgatgtattggcctttgagtctggcttccctgatacaaatgcatcctaccttaatatggaccaattaacccctaaaagcacgatgaaaaactccatttacgctgtatggcacacagaagatgtcgttgaattgtttgattacatgaaagagcaaaaagagaaaggcgatccgctgatccttaccggttttgatattcaaagcatgaagaattcattcaatgatgctgcgactcattgggtaaaagcggtggaccctgagaaagcagagttgctctcccaatcagaaaatgatttttcaacattagtgacagacagcaatacgtttgatgaattttcgcaaaagaaggaaaagcttgtgaaaaactatcagaagctgatcaagttcactaaaacacatgcttcagagctaaaagaaaaccttccaaaagagccgaaagcttatgagatgtttatgcattctcttcagctgagaattgacgtaatggaaacgtatatgctggaagaaatgaaagaaaaactagaggagtatccggagaatattgaggatttttcattctttatgagagaccgcatgatggctgaacaatttcagtgggtagctgacaccctttatccgaaaaagaaaatcattgtctggggccacaattaccatctacgcaaacagaatacgaagatgataaaggactgggtacagctaaatggccctaacatgggtgattatttgccggagcggctgaaaaaacaaacatatacgattggcatttatgcttactcaggtgcgagtcttgatagctccgataataagactgttaagccggttacaagcccgccgccgtctgggagccttgaagctttgctgaaagcggcggaccgaccggctgtttttgttgattttctccatacaaaaaacaagaaaggcacttcgtggatgtataccccccgcacagcactctattggggattcacagaagagcagctgatccttaaggaacaatatgacggtgtcatttggctggagcatatcacaccatctgtcattatcaagtgagcggtgtcccctgtggtaaacaggggatttttacatatcgcaaaaataatcaaaacatataatccgtgatccattattctaaaacagaaaggagattggagcgtgcaatgtattatgaaaaagctgtccagaaaacaatcaattggattgaatcacatttacatgagcaaatatcaaacgaggatattgttaacgtttcaagcttttcaaaattccattttcatcggatttttcaaaaagaagtcggcatgtcggttgcttcttatattcggttaagacgtcttgcgaatgcggcggcagctttgctttatacagatcatcgtattatcgatattgctttgtattatcagtttgaatctcaagaagcatttacgaggacgttcaaaaagatgtatcacatgccgccaggagcataccgaacatttatgaaacgctttacttcaaaaaaggaggaatcttacatggagaaaaaaatgaaaggctgggtattgagcgggagccatccgttccaattcgaaatggggattgaccgggaaaatgtacatcagggaaaagcttcagggtatttaaagtcaacgatggttcaggatatcggtgaatttgcgacgatgatgcagcaattcaaagcagatcgctatctaggaaaaaggcttcgtctatcaagttttatcaaaacaaagggggtgcagcattttgcctcactttggatgcgggttgacagtgctgctgatgatgttctccaatttgataatatgagcaacagacctattaccggaacaaccaattggaatcattatgctatcgttttagatgtcccagaaaatagcgctgtgatatcttttggcgttcaattatctgggccgggtcaggtgtggatggatcatgttgtttttgaagaggtagatgagagcgttccttcaacaaaccttgaaatgccgggagaacttttagatgaaccggtaaatttatcttttgaagaggaactacaaaaatagttttcagacaactatttttattagtgagttattggaaaatactatttgttattaataaacccttgtgctgcttaggtttgtaagagcttggatatttttatcagtctgggcggatctgttcatctttgcggcattttcctgtatgatatagtaagagtgtgcatagcaactaactataattgaacagggtgtttaaaacatggaaaaacaatacagagtattactttactataaatatgttccgattgaagatccagaggcgtttagagagcagcatttggctttttgtaaggagcttggtttgttaggccgtatccttgtttcttctgaaggaattaacggtacggtatcaggtacggttgaacagactgaaaaatatatggaaacaatgaaagctgatcctcgttttgcggacatggtatttaaaattgatgaagcagaaggccatgccttcaaaaaaatcttcgtccgccataaaaaagagcttgtaacgcttcgtcttgaagatgatgtcgatccgaacgaaacaacaggccagcatttgaagcctgcagaattttatgagaagatgcaggatccaaacacaattgtcatcgacgcgcgtaacgattacgagtatgaccttggccatttcagaggtgcggtccgtcctgacatcgaagccttccgcgaattacctgaatggatcgaagaacacaaagatatgcttgaaggcaaaaagattttaacgtactgtacaggcggcgtacgctgtgaaaagttctcaggatggctggtgaagcaaggctttgaagatgtagcacagcttgaaggcggaatcgtgacatacggaaaagatccagaggtgcaaggcaagctttgggacggccagtgctacgtatttgatgaaagaatcagcgtgcctgtcaaccgtgttgagcatgtgattgtcggtaaggactactttacaggagaaccgtgtgagcgttatgtgaactgcgcaaatccatcttgcaataaaaaaatgatatgcacaccggaaaatgagtataaatatatgcgcagctgcagccacgaatgccgcacgaacccaagaaacctgtatgtgaaagagcataatatgacagaagaagaagtaaacgcaagactggcagcgattgaaacagaagatcacgctgctgctgaataaaaaaagaacacctcgtattgaggtgttctttttttctatatgctttcagtttggctgtttgcggaaacccattctttttggcggaaggccttttcccattttgataccacgatacaggcgatcgcatgtcccggtacgttcacgcccgttctcgccatgtccatgacgcggtcaacacccgcgataatggcaacgccttcagccggcagtcctacagcattggcagtcgccagaagaactacaagcgatcctgagggtacagctgcaatgcctttactggtcatcacaagcacaagcatcatgagcagctgctgggacaatgtcatgtctacttgaaaggcctgtgcgagaaagatacaagaaactgataaatataagctggagccgtcacagttcaatgacaagccggagggaacgacaaatgataccactcgtttgggacagccgtatttctccattctatccatcagctgagggagaatggtttcagtgctggtggtggaaaatgcaattaaaaacagatcccatatcattttcaatacttcgaaatacttaatctgaaagatgagaccgacaagcggaaagaggacaaagaggatcaggaacaggccaaggaatacggtgccaaccagcttaaacatagggaggaggagttcaatgccgtattggcctacagaagctgccatcagggctaacacgccgataggagcagtgaccatgacgatttgtgtgagcttgaacataatctgagcggtagattcaaagaacttcatcactggttcagaagctttgccgataccagcggcggcgacaccaaataaaatggcgaagaaaataacggcaagcaaatcatttctggccatgacatcaataatgtttgtagggataatatccaggatcatttgcttgaaatcaacaactttgtctgtgtagccggaaagttcatggatatctttttttgccaaatgggagaggtcaagcccgacacctggttttaagacattcgctaataaaagtccaagccctaataccaacgttgtaatcacttcgaaccaaatgatcgtcttgatgccgagactgcccatttttttcatgcttccgcttcctgctgctccaatgacaatggtagaaaatacaatcggcacaacaatcattttaatcaggcggataaatccatctccgacaggcctcagtgccatcccgaaatcaggaaaaaagtggccgatcaccgcaccgacagccaaagcgattaaaatttgaaacgcgattaattttttcaaatgaatccccctttagaacgatagaatgtaggcatattcatatcattcgtgattcaaatgcaaacaccttttttcaagttattttattttgacagcgctttcattatgttggcgaaaaagtcccccgcagcagggggacttttttacttcatttgaatgtgctttagatcttcttcagaggtatttgtgaaaataaccggtgttatggctgaagcggcatgctgcttgatgtaattgagatcaaaggtgagaagcagttcgccttgtttgacggcttgtccgcttgtgacatgtgcttcaaagccttccccattcagtttgacggtatcgatgccgacatgaatcaggatttcagtgccgccggcgctcataaagccgatggcgtgttttgtcggaaaaatcgagacgatctcgccgtccgcaggtgcaacgacttttccttctgatggtataatcgcaaatccctcgcccatcattttttctgaaaagacttgatcaggcacatcccctaaagagactgtttctcctttaatcggataaaaaaaggtctcaccggaatcgggcttctgcggtttgtcagttaccgtgtccagcgtggcggcggtggcagggacgcctccggccatgattgttttgatgtcgtcttttaaggcatcggacttggttccgaatattgcctggaagttgttgttgacctccagcacgcctactgcaccaagccgttttaattcatcctttctgacttgacttggctgatgaacggtcacacgaagccttgtgatacacgcatccaggttagcgatattttgctgtccgcccaaggcctgcaacacgtgaaaggcaagttggtcttttgcaactggagctttctcctcattctgaccgtcttcatctgtctcacggccgggcgttttcaaattccatttcagaatcgcaaatcggaacaaataataataaatgaaagcaaacacgatcccgacaggaatgacaacccagccgtttgtagacagtccgtagttcaagacgtagtcaattccgccgcctgagaacgtatagccgtggcggacatggaataaatcacaaacgacaaagatgacgccggcaagaatagagttaatcaaatagagcacgggcgcaacgaacaagaaagaaaactcaaccggctctgtaattccggtcagcatagatgtgagcgccgcagaaatcatcacgccggagatcatttttttcttttccggacgcgcggtatggataatggcaagagcaactgccggcagacagaaaatcatgtaagggaaatcccccatcataaagcgcccggctgtcgggtctcccgcgaaaaaccttgtcaggtctccggttacggtgttgcctgttgatgggtctgtgtattctcccatcataaaatagaaaggcgtataaaaaatatgatgcaggccaaaaggaatcagcaaacgatagatcgttgcataaaagaacaggccgactgttgaatcggcaattaaactgctggctgcgttaattccgttttggattagcggccaaacgaatgagaaaatgacgccgatcaccaatgaactgacggaagtaataatcgggacaaagcgttttccagagaaaaatccaaggaccggatgcagctcgattgatgaaaatcgcttatataaataggcggcgagaagcccgataatgattcctccgaaaacccccatatcaatcaggtgctcggctccttcatacggaggctgaaggccgagtaattttcccatattgtcgagggtgacggttaaaattaagtatccgatgacagctgcaagtccggctacaccttctccgccggctaatccgatcgcgacccccacggcgaaaatcagcgggagattatcgaatacaacgccgcccgcatcctttataatagggatgttcagtaaatccttgtctccgaaacggagcaaaagacctgctgccggcaggacggcaaccggagtcatcaacgcgcggccaagctgctgcagaatttgaaatgcctttttaaacatgacagtctccttttattgtgttatgagaatgatgcactctttaatttttgagctgctttataatcggcgataacggttacatgattgtgtttttgaagaatagaggctggtacatctgtcgtgacaggacattcagccatcttttgaatagcgtctgctttttcctcgccgcttgctaaaagcacaatatgtttgctgaattccatgatggttttaatgcccattgaaatcgcgagtctcggaaccagcaccggatcgccgccgaagaatctggcatttgcctgtatcgtgctttccgagagcttcacaacacgtgtccggtcttcaaaatcagatcccggttcattaaaaccgatatggccattggcgccgatgccgagaatttggacatcaatgcctcccgcctggcggatgagatcctcgtatactttgcattccgcctcaagctgcgggttgtctccttgcgggatatgaatatgatcaggctgcatattgatatgctgaaatagatgctcatgcataaagtggttataactttgcggatgagatggagagagaccagcgtattcatccaaattaaatgtagtaacctttgaaaaatcaatttcgcctgcctgatagtctgaaatcaactgcttatacaagccgaccggtgtgcttcctgttgccaggccgagaacggtatctttcttagcttgtatttgttctttaataatggcagcgcttaacttacagagttcttcgtagtgctcggcgattagaatcttcatgtgacaccccctcaaagagatagacaagcaccatatttgttatgaccaatttatgatacttgtcattacgaatttagcaccgcccttatcaaactgtcaatattaatttctgaaaatttgttataaaagaaggatacaaatctttcatattgggatggcaaatggtattatggtctcaatgaaaaagaacggattgcatacagaatggggagaatgaaatgacagctttatattctgtgatcaagtttaaaatcattgagttgattaaatcgggcaaatatcaggcgaatgatcagctgccgacggagagtgagttttgcgaacaatatgatgtcagcagaacaactgtgagactggcccttcagcagctggagcttgagggatatattaaaagaattcaaggaaaagggacatttgtatcggcggcaaaaatacaaacgccgattccgcataagattacgagctttgcagaacaaatgagaggccttcgttctgaatcaaaagtgcttgagcttgtggtgattcctgccgatcactccattgccgagcttttgaaaatgaaagagaatgaacctgtcaacaagcttgtcagagtcagatacgccgagggggaacctttgcagtatcatacctcatatattccctggaaggcggcaccggggctggcgcaggaggaatgcaccggctcgctgtttgagttgttaaggacaaaatacaatattgaaatcagcaggggcacggaatcgatcgaaccgattttaaccgatgaaacgatcagcggccacttattaaccaatgtcggagcgcctgcgtttttatcagaatcccttacctatgataaaaatgaagaagtggtggaatatgcgcaaattattacccggggagaccgaacgaaattcaccgtagaacagtcatatcattcataaagcaatgtgttttaagaagggaatggtggttctatgtttttatttacgaatggaaaagtgctgtggggagcagtgattgctgcattcatcctttcaattgtattttacccttttctgccgacgcagatgccgattcattatgatgttgcgaacagtccggatctgacggttaacaagctggcggggactgtgatgctgcctgttttgatggtggtgtttgcatgggcgcggaagatcaattggcaatttgtattcgcagtgtatattttgctgatttgccacattgtcgtcctttgtttagcgctctaaatcaaacagccagaataaaactggctgttttctttaatttcagcttcatctgacaatgaatgtggtgtataatagctgatgatcctaaagaatattctgaaatttatcggtgtggagcggcgtatcatgaaaggaagggctgtatgttttttgcagctttaaaaagactgaatatttaaacaattatatgaaaggtgtgctgatcagattgaataagcttattgaacgagaaaaaactgtatattataaggaaaagcccgacccgtcttccttggggtttggacaatattttacagattatatgtttgtgatggactacgaagagggaattggatggcatcatccaagaattgcaccgtacgcaccgcttacgctcgatccgtcttcatctgtttttcattacggccaggctgtttttgaaggattaaaagcatacagaacagaggatggcagggtgctcctgttccgtccggatcaaaatatcaaacggctgaacagatcgtgtgagcgcatgagcatgccccctttagacgaagagctggtgcttgaggcattgacacaattagttgagctggagaaagattgggttccaaagaaaaaaggaacgtcactgtatattcgtccttttgtcattgccacagaaccgagtctcggtgtgaaggcatccaggagctatacatttatgatcgtgctttcgcctgtcggctcctattatggcgacgatcagctgaagccggttagaatctatgtcgaagatgagtatgtgcgggcggtcaacggtggagtcgggtttgcaaaaacggctggaaactatgcagccagtcttcaggcacagcggaaagcgaatgagctgggctatgaccaggtgttgtggctggacgccattgaaaagaaatatgtggaagaagtagggagcatgaacatctttttcgtcataaacggggaagctgtcacacctgctttaagcggaagcattttaagcggggtgacacgtgcgtctgcgattgaactgattcgaagctggggcattccggttcgtgaagagagaatatcgattgatgaggtgtatgcggcctctgcacgcggagaattgacagaggtcttcggcacaggcacggcagcagtcgttacgcctgtcggtgaactcaacattcatggaaaaacggtgattgtaggcgacgggcaaatcggggacctctcgaaaaagctgtatgaaacgataacagatattcagcttggcaaggtgaagggcccgtttaactggacagtggaagtgtgaaaatcgaaaaagaacctgcctgaaggcaggttctttttattttgaataagtcatatcagcagccggctcgcttttgcggttttttacataatatattgcatagcaaatggccataaatggaacgccgcaatagagtgcgattctttgattcggatcaaaggcaatgccaacaacggaagccaggcataacaggaacgcagcaatcggcacgaacggatacaaaggggttctgtatttcaaatcagtaaccttgtttcccgcttcgatataacgttttctgaacatgaattgagaagcagcgattcccatccacacgacaacgacggcaaaaccggaaatcgacacgagcacaacgtatacagtgtctggcgcaaatacgctggacagcaacgacagaatgccgccgatcatgctgaacaccagcgcgttaaaaggggttccttttgacgtcagctttgcaaatgtcggatgaagcgttttttcttttgataaagaccacagcatccgggaagaagcgtagagtccggaattagccgctgacaggatcgctgtcaggataacaaagttcatgatatcggctgcgtatggtacaccaactctgtcaaaaacagcgacaaacgggcttttgatgacacctgcatcttgaatcggaatcagccctgacagcacaaaaattgttccgacaaagaagagtgagagacgccagaccgttgttttaatcgcttttggtatcgtcttgtcagggtcaacgctttcaccggctgcgattccgattagttccgttcccgaaaaggcaaaattgacggacagcatcgtcatcaaaatcgggacaaatccatttggaaaaagcccgccttccgcggtgaagttggacagcatcggagcggcttctccgcctttgatcggaatgatgccgaacatggcagagccgcctaaaagaataaataatacaatggctaatactttgatgctggaaaaccaaaattctgattcagcgaaaaacttgaccgaaaatgcgttaagcaagaaaatgaacagcgcaaagacggcactccacatccaaaccgatgtatgggggaaccagcgctgcattaacaggccggctgctgtgaattctgatcccaatgccacggtccatgttagccagtacagccaagcaaccgtaaatccggtgcccggccctatgtatttggctgcataggtgtgaaaggcgccggtcacaggcatggcgactgacagctcaccgaggcatagcatgaccagatagacgatgccggccccgactaagtaggcgagtatcgttccggccgggcctgcttgctgaatggtataacctgagcttaaaaacagcccggttccgatgacacctcccaaggaaagcataaagaggtgccggcttttcatacttctctgaaagtttgtctcattcttgttgtgggcagagttcatctttttccaactttctataagcgatttatttcctcctaataaaaaatctcatgtcaggaagtgacacgagactccggcgaaccggctttaagttagaatatacaaactattccgataagtcaagttgtttttaaagagcgggcccaagccgcaatttcttgaatatcttcgggttttgtccggcagcagccgccaatcagtctcgcccctttttcatgccaggtgcgggcgctcgccccgtaagattctgcgtatgctgcgccgttccacgtttttgtttccggatcatattgctcacctgaattcgggtagacaatgatcggttttgacgtgttcttttttaactcctctatcaaggaagggatatgctgaagcggcgtgcagttgatgccgagtgctgcaatttggcggtgttcatcaagccacgatgcgcagtcagctgcaggtgctccgtcactgatatgcaagccgtctttagcactgaagctgatccacgcatacgtttcaggaaattccttcaacagctgaacaatcgctttggcttcagtcagacacggaatcgtttcgcatgccaaaacatcagctccggcttcaatcagcgccttcatccggggacgatgaaattcaatcagttcatcttctggtattgcgtagttgccgcgatattcagacccgtctgcaagataagcgccataagggcctacagaagccgcaatgatcggctttggccgattcaaacggttctcttcaagcgaccaaaattcatcgcgtgcttcagctgcgatgctgacggacaactcgatgagccggcgtgcttccgcttcgctcagcccgcgtgcggcaaagccttcaaatgtagactgatagctggcggtgattgcacaatcggcgcctgctgcgaaataatcagtatgaacttgtttaatcagctccggctcttccatcaggatttttgccgaccacagactgtcgttcaaatcacagcccttgcgttcaagctcggtcgccatggcgccgtctagcacaataagcgggtatgtatctagtatgtgttggataggattcatagaatgtacctttctttcagatttttttgaaaaagatatgaaaatcgtaatggaggcttacgtgtttgtcaataaacgcaaaaagagaaaggtgttcagcccatatgtctgaacacccttttcttatgatatttgtttgttgtgcgtgtcagtctttgtgtctgaaaccggccagcactcaatgccattatggtttttgagcacatctttataaaagacaggatctttgcctgcttttttctggcgtgtatagtctttcagcgccgtaaaaacaacctttgatagtaagaaaatagcgattaaattcacgacgaccatcaaacccatgaacaaatcagcaagatcccagacgagctggactttggcaacacagccaaacacgatcattgccagcacgccgatacggtagacaaaaatcagttttttgcttttgttcaaaaagccgatattggtttcgccataataatagtttccaattagagcacagaatccgaataacaaaatcagaatggccagaaagcctgatgcccatgatccgacatgggagctgagggaggcttgtgtcaaggcgattccgctcagacccggagtatgataggcatccgaaaacaggatgataaaggcggtgcttgtacaaatgaccagtgtatctgtcagtacaccaaaagcttggatcagcccctgtttgacgggatggcttgttgtggcggtggcagcggcattcggtgcgcttcccattcccgcttcgtttgaaaagattccccgtctgacgccttgcatgagtgccgcgcccaaagccccgccggcggcctgatcaaaaccaaacgcatttttcacgattagcgcaagcacacttggcagctgcgtaatgttggtgaaaatgacgaaaaacgcaactccgatatacaggacagccaatacgacgacaatggattcagccagctttgcaatgcgcttgactccgccaaaaataatcgtgccgaatacagcaattaaaatgagtcccaatgtcaggcggtttgtgccaaacgcgttttcaaaggcaaggctgactgtattggattgaaccgagttgaagacgataccgaacgataaggtgattaacacagcgaacagcgcgcccatccaccttttgttcagccctttttccatgtaatacgccggcccgccgcggaagccgtttacatcttttactttataaatctgagccagtgtgctttccacaaagctggatgctgatccgataatggcgataatccacatccagaagattgcaccgggcccgccgagtgcaatggcgatggcaatgcccgtaatatttcccgttccgacacgggccgccatgctgatgcaaaaggcttgaaacggagaaatgctgttttttgaccgggaagcagcaccttctcttaataccctgaccatttctttcagcatgcgaacctgtaaaaacttaagcctgaacgtaaaatagattcccagagaaaggagcaaaacaattaatagctttgaccacaaaagatcatttgcaataccgacgatatgttccaggatttgctgcatacaatcacctcttttttcatatttaaaaaatgctgagctcccattcctgcgccatatgcttcagcagcataccgccagtgaggctgttgccgtattcatcaatggcaggcccgtaaatgccgatgccgcatccggattgaaaaggctgttctcttctggcgcttggaggcaccagcgccatgatgccgccggagacgccgcttttggccggcacgccgacaaacgccgcatatttgcctgaagcgttgtacatgccgcacgtcagcattaatgccttggctaattttgccacatcttttggaatcacctgctcgcgtcgaatcggatgatacccgtcatgagcaaggatcaggccgatcaacgcaatatcttctgtggtgctctccatagcgcattgcttcaagtacacctcaagtgtttcttctacgtcagcttctaaaaagtttgtttcttttaaatagtaggccagcgctctgttgcggtgggcggtttcccattcagaacggaatacttcctcatgaattctcggccgttttcctatcaaagtttccatcaccgagtaaagaaactcgagcttttcgtatgccgattctccgggaaggatcgaagcgatggtgagggcacccgcgttgatcatgggattgaagggctttcccggcttgttgatttcgagccgaatgattgaattaaaggcgtcgcctgtcggctcgacatctacgcggtccagcacatagggaatgccgcggctcatgcaggcggcaataaagctaatcacttttgaaatgctttgcagggtaaaagagacgttccagtcgccggcgtgtatcatcgttccatcaggctccaatacacagatgccgagctgtgaatcattgacttttcctaaagcggggatatagtttgcgctttgtccattggcggcaaaagggcgatagtattcaacccaatcatgaagctgtaacgccggatttatgtctttctggtgctcttttatcaattctttcatcgaattcctcctcactgatttttttcttaaaggactgaggtgtatcaaaacgaaggctaaaggggcgttaaacgctttcataatagcggaaggtataattactgtataatggagactacagaatcatacaaaatacgacaaaaacattttgaaaataagcagtaagatttataaaaacctcatgttctgggtcaaaagcaatttgcaggttttctcccgattccccaaaataaaaagcgaggatgtgatcaacataaaactggaacggtttattgaaaaagacggatatatactggccctcatgctaattacggtgccgctggccggtgaactgaaattttatcccctcaatgaagaattccgggtcagctttggggcaccggtttttttcttctttttatcgttgttgcggcatgtgcccgctgtgctgccgggttttctgactggagcggctgttttcatctttcgcgtctttctggaattatggggcggaggacacaatgggctgactccgattctgtatgatcaagcgtctggctttttcttttatatgacttacgcctgtctgttttccatattaaaggccaatcgtttccgtgaacggccgattatgctcggtttcattgggtttatgattgaagttgtgtcagattgtgtcgagctggctgtgcaatttctcatttttcatacggttgttacgcctgagaaaatcactgacattgcggtgattgcgatttctcacacatttattgtgatgagcttttatagtgtgctgaagctgtatgaaacacaatcgagagaaaaacagacaaggcagcagcacgagcacatgctgatgatcgtttccaatttatatgaagaaacggtgcacctaaaaaagacattgaaaacgacagagaaagtgacaaacgattcgtatcagctctatcgggaaatgaagggcaaggatgttcagctgagcggcagaatcctgagactggccggagagattcatgaagtgaaaaaggacaaccagcggatattcgcagggctttcaaaactgatttcgaatgagagtttgagagattatatgagggcttctgatttgctgcagctcgtgattcgaatgaatgaaaagtacgctgaagcactagggaagcagattgatttttactgctcgatcgagggagagcatgacgaatatcacgtatttatcgtgctttcgatcattaataatctaacagcaaatgcggtagaggctatggatgaagagggaatggtcagcctgaggctccgtaagccaaatgagagtatggtagaattccaggtggaagacaatggccccgggatttccgagaaaatcggagacattgtgtttgacccgggctttacttcaaaatatgacgaatttggcacgccttctacgggtatcggactttcctacgtaaaggaaatcgtgactgagctagaaggggatatcacgtttgataatcagcagcggggagtggtgtttgccatcaggctgcctgtccggcatttgattcagaaagggtgaaccgaaagctatgcgtttttttattgcagatgatgaccgtgcagtgcggtcaattttaaggcagatcattgaggacgaagatctcggggaagctgttggtgaagctgacgacggaagccaagtggaagggcatatgctgcaatttaagcagattgatattttattaatcgatctgttaatgcccggaagagacggcattgagacgattcgtcagatccagaatacgtactccggcaaaatcataatgatctctcaagtggaggcgaaggaaatggtcggggaagcgtactcgctcggcatcgaatattttatccataagccgattaaccgcattgaaattgtcacggttctccaaaaggtgaaggagcggattgagcttgaacactcgattggagccattcagcattctctaagccggcttgtcaatcggactgaacggaaagcgcgtccccagcagaagagtgacagcggtttaaaagaggcaggaacattcctgttgtccgagctgggcatgatgggagaaggcggcgcacatgatctcatggcggtcctgcagtatttagcagaacacgagcaatccgagccgcacgaaaaacaaagcccttcgctaaaacaaatattcacccaagtagcgctacggaagctgggcacaggggcctcacagacggaagtcaatcgcgaaatgaaagcctcggagcagcgtatccgcagagcgattattcattcgctgcaccattttgcttcactgggcacaactgatttttcgaatccaaaatttgaaacctatgcatccaaattctttgattttccggttgtcagccagaaaatgaaagaactccaatccaaggatgcaaaaccccttgcacctgctagaataaatatgaaaaaattcatccacgtgttttttttggaagcaaagcttttgcatgagacgatgaaacaaagaaggatataaaccaaacagccggctgaccaggctgtttttttgctgcgcagaatcccggccggacagtgattcaccgcttttttataaaatatcagaaaataaagatattgacttattgtttatttgtcttacaattaaacaaaaggatatatggggaaggagcggatgtgaaagaaaaattaataaaagcgcttacagatagaggctgtatacacaaataacaggaggttatgttgatgagccgtatcagaaaagcacccgctggaattttaggttttccggttgctccttttaacacacaaggaaaactggaggaagaagctctttttcaaaacattgagtttttgctgaatgagggcttggaagcgatatttatcgcttgcgggtctggtgaattccaatctctcagccagaaggaatatgagcaaatggtggaagtcgcagtctcggcagccggaggaaaggtgccggtctacacgggggtgggcggcaacctcagcacagcgcttgattgggcgcagctgtcggagaaaaaaggcgccgacggctacttgattctgcctccgtatttggtgcatggcgaacaggaggggctgtaccagtatgcgaaaacgattattgaaagcactgacttgaacgcaattctttatcagcgcgataacgccgttctctctgttgaacagatcaaacgtctgaccgaatgtgaacagcttgtcggtgtcaaagacggggtaggaaatatggatttgaatatcaacctcgtctatacgatcggcgaccgcttaggatggctcaacggaatgccgatggctgaagtgacgatgccggcttatctgccgatcgggttccactcttactcttcagcgatttcaaattatatcccgcatatttcgcgaatgttctatgatgcattgaaaaacggaaatgacgagcttgtgaaggaactctatcggcatgtgattctgccgatcaacgacattcgcaaacaacgaaaaggctacgccgtatccttgattaaagccggtatggaaatcatgggtttgaatgtaaggaatacagccagaccgcctgtcggcccggttgaaaaagatcattatcagcaattggaagcaattttgaagcaggcggctgaccgttttccgaaaaaagccgcgacggtttgaccagaaaaaacacgaaaggggcaatgggcatgtctgtgatcacggaacaaaacacgtatctcaactttattaacggagagtgggttaagtctcaatcaggcgatatggtcaaggtcgaaaaccctgccgatgtgaatgacattgtcggatatgtacagaattcaacggctgaagatgtggaacgtgccgtcgccgccgccaatgaagccaaaacggcttggagaaagctgacgggtgccgaacgcggccaatacttatacaaaacagcggatatcatggagcagcgcttggaggaaatcgccgcctgtgcaacgcgtgaaatgggtaaaacattgccggaagcgaagggagaaacagcccgtgggattgccattctgcgctattacgccggagagggcatgcgaaaaacgggtgacgtcattccgtctactgacaaagccgcgctcatgtttaccacccgtgttccgctcggtgtggtcggcgtgatttctccgtggaacttcccagtggcgattccgatttggaaaatggcgccggcattggtatacggcaataccgttgtcatcaaaccggcgacagaaacagctgtgacatgcgcgaagatcattgcctgctttgaggaagcggggctcccggcaggggtcatcaatttggtgacaggcccgggttctgttgtcggtcaggggcttgctgagcatgacggtgtaaacgccgttacgtttaccggttcaaatcaagtcggaaaaatcatcgggcaagccgctttagcgaggggagccaagtaccagcttgagatgggcggcaaaaaccctgtcatcgtagctgatgacgctgaccttgaagctgcggccgaagctgtcataacgggggccttccgttcaaccggccagaaatgcaccgcgacaagccgtgtcattgtacaaagcggaatttatgagcgctttaaagaaaaactgctccagcgcacaaaagatattacaatcggagacagcttaaaagaggatgtctggatgggaccgattgccagcaagaatcagcttgataactgcctgtcatacattgagaaaggcaaacaggagggggcttcccttttaataggaggagaaaagctggagaacggaaagtatcaaaacggctattatgttcagcctgccatctttgacaatgtgacatctgagatgacaattgcccaggaggaaattttcggtccggtgatcgccttgatcaaggtggactcgatggaagaggcgctgaacatcgccaatgatgtgaagttcggattaagtgcatccatcttcacggaaaacatcggccgaatgctttctttcattgatgaaatcgatgccgggctggttcggatcaatgcagaaagcgcaggtgttgagctgcaggcgccttttggcggcatgaagcagtcgagctcccactcccgagaacagggtgaggcagcgaaggactttttcacagcgatcaaaaccgtttttgtgaagccgtaatggtgctggaaagaggcatgcgtctctttcccagctttatcacagccagcatatgattctctactttgaaaaggagaagatactatgaaaaaagactttgcgaatgttacaccggcgggcaaaaaaacgtccgtgcgctggttcatcgtgtttatgctgtttcttgtgacctctattaactacgcggatcgagcgacgctttccatcaccggagattccgtccagcatgatttgggattggactcggtcgccatgggatatgtcttttctgcctttggctgggcctatgtcatcggacagcttccgggcggctggctgctggaccgttttggttcaaagactatcattgcgttaagcatctttttctggtcgttttttacgctgctgcaaggggcgattggctttttctccgccggcacagcgattatcctgctgtttgcactgcgttttctggttggtttatcagaagcgccttcatttcccggaaacggcagagttgttgcctcatggtttccaagctccgagcgcgggacagcttcagccttttttaattcagcacaatacttcgcaatcgtcattttttctcctttaatgggctggcttacccactctttcggctggcattccgttttcgttgtcatgggtattgcaggcattcttctggctgtcatctggctaaaaacggtgtatgaaccgaaaaaacatccgaaggttaatgaagctgagcttgcgtacatcgaacagggcggcgggctgatttccatggatgacagtaaaagcaaacaagaaacagaatcgaaatggccgtatatcaaacagctgttaacgaaccgcatgctgattggcgtgtacatcgcgcaatactgtattacgactctcacctatttctttctcacatggtttccggtatatttggttcaggcccgcggcatgtctattcttgaagctgggtttgtcgcttccctgccggcgctgtgcggatttgccggcggcgtccttgggggcattgtgtcagacatcttactcaaaaaaggccgttcactgacctttgcaagaaaagtgccaatcattgccggcatgctgctgtcttgcagtatgattgtctgtaactacacagattcagcatggctcgtcgttgtcattatgtcgctcgcgtttttcggaaaaggcttcggcgcattgggttgggctgtcgtgtcggacacgtctccgaaagaatgtgcaggattaagcggcggtttgttcaacactttcggcaatattgcctcgattacaacaccgattattatcggatacattgttaatgccactggatcttttaatggcgcgcttgtgtttgtcggcgctaacgcgattgcggcgatcctcagctatttgctgctggtcgggccgatcaaacgggtcgtgttaaagaaacaagaacaagaccccgatcaatcgttgcctgtctaatatttatgaaagcgctttataaagggaggaaaatgcatgagttcaccgatacaagagcaggttcaaaaagagaaaagatcgaatattccctcaattactgaaatgaaggtgattcctgttgcgggacatgacagcatgctgctgaatctaagcggagcacacagcccgttttttacccggaatatcgtaatcttaacggacagcagcggaaatcagggagtcggcgaggtgcctggcggagagcatattcggcgcacactggagctgtcagagccgcttgttgtcggaaaatctatcggtgcgtaccaagcgatattgcaaacggtcagaaagcagtttggcgatcaggacaggggagggcgaggaaaccagacgtttgatttgcgcaccactgtgcacgccgtcaccgcactggaagcggctttgttagatttgcttggaaagtttcttcaggaaccggtcgcggctttactgggcgaagggaagcagcgtgatgaagtaaaaatgctcggttacctcttttacatcggcgaccgaaagcggacgaccttgccgtatcaaagcgatgagcagtcagattgtgcgtggttccgtctgcgccatgaggaagcgctgacgccggaggccattgtgcgtcttgccgaatccgcacaagagcgctatggctttcaggatttcaagttgaaaggcggggtgctgcggggagaagaggaaatcgaagctgttaccgcattatcgaaacgttttccagaggcaaggatcactcttgatccgaacggggcatggtcattagaggaagctattgcattatgcaaaggaaagcaagatgtgctcgcgtatgcggaagatccgtgcggggatgagaatggctactccgctcgtgaagtaatggctgaattccgccgcgcgacagggcttccgactgcgacaaatatgattgcgactgactggcgggaaatgggtcacgcgattcagctccatgcggtcgatataccgctggctgatccgcatttttggacgatgcaagggtcggtgcgggttgcgcaaatgtgcaatgattggggtttgacatggggctcgcactccaacaaccactttgatatttcccttgcgatgtttacccatgtggcagcagcggctccggggcggatcacggcgattgatacccattggatctggcaggacgggcagcaattaacgaaacagccttttgagatttcttctggctgtgtcaaggtgccggataagcctggactaggcgtcgatattgatatggaacaagtggaaaaagcgcatgagatctaccggaaaatgaatttaggcgcacggaatgacgcgatcccaatgcagttcctgatccgcaactgggaatttgaccggaagcgcccgtgtcttgtgcgataagtttgtttgtaaatattgtcatatccgctattttgtcttacaattgaacaactgaagggagagttgttcgtgtacgaaggtttagaggatttgaaagtcgatacagtcaatcggaaaacattagccaagcaggtcatcgaacggattgtccatttattatcgagcggacagttgagggctggagacaaattgccgacagaaatggaactgatggacattttgcatgtcagcaggccggtgctacgggaagcactcagttcacttgaaacgctgggcgtcattacgagaaaaacacgagggggcacatatttcaacgataaaatcggcatgcagccattttccgtcatgcttgctttggccactgataatcttccggctatcattgaagcgcggatggcgctagaactcggactcgtgacaattgccgcggaaaaaatcaatgaggaagagcttcagcgtttgcagaagacgatcgacgatattgccaacagcactgacaatcattatggtgaagcggataaagagttccatcgaattattgcgttaagcgccaataaccccgtcgttgaagggatgattcagtccctgctgattacccatgcgaaaattgacagccaaattccgtacagggagagagatgtaacggtcgaatatcacaaaaaaatctacgacgcccttgccaaaagagatccgtacaaagcacattaccacatgtatgaacatctgaaatttgtccgtgacaaaattctaaaaggaatggatgaaaaataatggtgagcaaccgcagttgaaacgtaagagctgcggtttttttaaaaccaatttagaaaacgcttactaagttatgaggagtgattttcatatggcgatgaacctcaggaagaaccaagcgcccctttacatcaaagtgcatgaaatagataacaccgcgattattgtaaatgatggaggactgccaaagggcactgttttctcatgcggactcgtacttgaagaggatgttcctcaaggccataaggtggccctcaccgatctcaatcaaggggacgagatcgtgcgttacggagaggtgatcggatttgctgatgagacgatcaaacgcgggagctggatacgggaagacctcgtgagaatgcccgctcctccggcgttagacgatcttcctctcgcaaacagggtgccgcagccgcggccccttcttgaaggctacacgtttgaaggataccgaaatgcggatggcagtgcggggacaaaaaatatcctcggtatcacgacaagtgttcaatgtgttgttggcgttttggattatgcagtcaaacgaataaaagaagagctgctgccgaaatacccaaatgtcgatgacgttgtgccgctgcatcatcaatacggatgcggcgtggcgatcaatgcgcccgacgctgtcattccgatccgcacgattcaaaatcttgcgaagcatccgaacttcggcggagaagtaatggtcatcggattgggatgtgaaaagctcctcccggaaagaattgcctccgaaaatgatgatgacattctatcgcttcaggatcaccgaggttttgcggcgatgatccaatccattttggaaatggcggaggaacggttaatcaggctgaacagcagaacccgggtgtcatgccctgtttcggatctggttatcggcctgcaatgcggcggcagtgatgcgttttccggcgtgacggcgaaccctgccgtggggtatgcggctgatttattggttcgcgcaggtgcaacggttttgttttctgaagtgacagaggtgcgggatgccattcatttattaacgccgcgggctgtcagtgaagaggtcggacaatcactgatcaaagagatgaagtggtatgacagctatcttcggcggggagacgcagaccgaagcgcaaacccgtcaccaggcaataaaaaaggcggattatccaatgtggtggaaaaagcgttaggctcggtagcgaaatcaggcacaagccccatctccggcgtgctcggccctggtgaaagagcagagcaaaaaggcctgctgttcgcggcgacaccggcaagcgattttgtgtgcggcaccctgcagctggctgcgggcatgaatctgcaggtgtttacgacaggaaggggaacaccatacggcctggctgctgcgccggtgctgaaagtatcgacgcggcattccttatcagaacattgggctgatttaatcgatatcaatgccggccaaatcgcgacaggagaggccagtatcgaagacgtaggctgggaaatcttcagaacgattttggatgtggcaagcggccgaaaacaaacgtgggcagaccgttggggccttcataatgatttgtgcttgtttaatcctgctccagtgacttgattcatttttttatagcgattagatggaatatgatgtaaaatacaattaacgtataggaaacggaggggttacagcatggcattcattagattccgagtgacacgaattcaatagtgagcaactctcgcctgaatgcgggagaatcgggatgaatccgcctatgtatgagcccttatatggttattaaaaaagagggtggcgatgcctgccttcttttttctgcctccaaacatcccctctctctccttcagggcggagcatgagaaaggggaaatgggatgacaaaccttaccgaaaaacagatgatcacggagattgtcgggcttgcacgcagccaaggtttgacggttcattctgaggacgcgcaattgaatgaaaccggaatggactttcaagttgtatttgccaaggacgacacaggtatgccatgggtgctgcgaaaaccgcggcgaagtgatgttgtggaaagagcatctgcagaaggcataacgcttgcctttctccgcgcgaatctgactgctgatgtgccggattggagaattcacacgccggaattgatcgcttacccaatgttaaaaggaacgccggcggccgggattgatttggaacaaaagcaatatgtttggaatatgaatcatcagccgccatcagacgattttgtccgtacacttgctggcatactggctgaattacatggcacggatcaaatatctgctgggcaatccggaatagaagtgataaggccagaagatttcaggcaaatgacagcagactctatggttgatgtgaagaataagcttggcgtatctacgacgctttgggaaagatggcaaaagtggatagatgatgatgcatactggccgggtttctcttctttgatacacggcgatctccacccgccgcatatccttatcgatcaaaatggacgtgtcacaggacttctggattggacagaagcgaaggttgctgacccagccaaggattttgttctttatcaaaccattttcggagaaaaagaaactgcccgtttgcttgaatactatgatcaagcaggcggccgaatatgggcaaaaatgcaggaacacatttcagagatgcaggcggcgtatccggtggaaatcgccaagctagctctgcaaacacagcaggaggaacacatcaatatggcgctggaagcacttggtgtaacatcggattaagaattgacttcgtttcatgaaccgagtattataaactctacaaataatagaacggattaacaatcgtgaggaagagcaagtacgcatcagaatggaggttcagagagtcggtggcaggtgtgaaccgatcctcccctgatgccgaatgggcttctgaattgctttgctgaacggatagtaggcgatgccgggtttctctccccgttaccaagagaggagtatcgaaacataggttttctgtacttagagtgaacggctgtatagctgttaataaaggtggtaccgcgagaccctcgtcctttgcataggacgggggttttttgtgtttcttaaaggaggtgacggccaatggacgatggctggtggtggcatagcagatgagttagaaaggaggatatcaaatggtcattgcaactgatgatcttgaggtcgcatgtcctaaatgtgaaagagcgggagaaatcgaaggaacaccttgcccggcctgcagcggaaaaggtgttattctgactgctcaaggatatacgcttctggattttatccaaaagcatttgaataagtaaaggagaaaagctgagctgagatgagagcagaagagcagagtaagattcgtgaggccgcagcaggtacgatttttttgctgatcggaacagtttgttttgcgtctaaatcgatttggataaaatgggcataccaaatgggtgctgagccagatgccgtgctgctatataggcagctgctggctgttccgctgttttggctgatttttttaatatatcgtcctccaatgccagacggtaagaaaaaaggagacctatggaaggcttgtggcgcgggagtgttttgtttttttctgtctcccttgcttgattttatcgggctgaaccatgtatccgcaatggttgaacgtatattgctgatgagctatccgttgtttgtgtttggattcaccgcgtgtcgtgaccggaaaatgtcctcaattcaggaccttttcgcagttctggcggtcatgtttgggcttttcttggcgctgggcggctggaatgctgagcttttccaggcgaatatgattggagctgtattcattttgttatcttcggccgtctatgctggttatcttgtcctttccgggcatctcgtccatcaaatcggggggatccgtctcaatgcatacgggatgacagctgctggagctgccatgatgctttacacagggatcaaatcggcggctggcatgaatacgccaatggcagcatatccgctttctatgtatggtttgttcgcggtaattgcagtcgttaccacagtgattccatttgtgctaatgcttgagggcataaaacgaatcggggcacagcgagccgccgccatttcaatggcagggcctatcctgacgattttctatggagctttatttctcggtgaacggctcgggctcattcaagtcattggatgcggtgccgtattttttgtcattacggtgatggaatacaggaagctgaaaacaggaaaataagaataatttatataaaacacacacgtttttcaattacaataagtgtaattacgtgtgtgttttttgattttgtaaaggttaggtgagaagatgcagcgcatattgcttgtagaagacgaccactcaatcagtgaaatggtggatcattatttaacaaaagaaggctttggaattgtgcatgctttcgacggagaagagggcatccggctgtttcagcagggttcatacgatttggtcctccttgatatcatgctcccgaagctgaacggcatggattttctgaaaatcatccgggaaaaaagcaatataccggtcttaatgatttcggcaaaagacggagatgtggacaaggcattgggactgggttttggggcggatgatatcgccaaaccgttttcgatgattgagctgacagccagagtaaaagccgcgatacggcgggcgacgcaatattcggcagaggagccggctgtgaataaggtgatccggattcaccagcttgcgatagatatagacaatgtttccgttttgaaaaacggagagccgctccagctgacgtcaacagaatggcagctgctgtgcttatttgcatcaaatcctaaaaaagtgtttacgaaagaacaaatctaccgttccgtttggaatgaagagtactttgatgatcagaacatcattaacgtacatatgcggcggctcagagaaaagattgaggatgacccctcctcccctcaatatattaaaacgctatggggcatcggttataaattaggagagttttagaatgacagtgctatgggtggccgctgtcatcgctctggcgtgtctgaatgtgattcaattcataatgaaaaagaagcgggacgggaatctggcttacacggctgaccagcttagctacatgctcagccgggattcggcaggacaaattttgcttcctacagacgatcatgcgctcaaaggcttgcttgttaacatcaatcttatcgttgagaatcgtcagcagatcagcgctcgatttgccaaaacagagcaatccatgaagcggatgctgaccaatatgtcgcacgacctgaaaacgccgttaacggtcattctcggttatatcgaagccattcaaagtgacccgaacatgccggacgaagagcgggaaagattgctggggaagctccgccagaaaacaaatgaactcattcagatgatcaactccttttttgatttagcgaaattagaatctgaagataaagagatcccgattaccaaagtacatatgaacgacatatgcaaacgaaatatcctgcactattatgacgctgttcagtcaaaaggctttcaagcagccatcgatataccggatacgccggtgtatgcgcaggcgaatgaagaggcactggacagaatcctacaaaacctattatccaatgcgattcaatatggcgcggttggcaagttaatcggcatgacgctgtcttatgatgagaggaacatcgccatcaccgtatgggatcgcggaaaagggattagtgaaaccgatcagcagcgggtgtttgagaggctgtacacacttgaagaatccagaaataaagcatttcaaggaagcggcctgggtttaaccatcacaaaacggcttacagaaaaaatgggaggcaccatatccgtccaaagcaagccgtacgaacggactgcatttacgatcacattgaaacgcatgacatattaatcgtaagaatttcttaaggtttgagaaataaaaatgacagggctcgccgctacaatagaaaacaggaaaagagagggaaggagaaacaaagttgacttatatcgtacaaacaaacgggctgaccaaaacgtatcagggcaaagaggtcgtatccaatgtcagcatgcatattaaaaaaggtgaaatctacggctttctcggcccgaacggcgcggggaaaacaaccattatgaaaatgctaacgagccttgtcaaaccgacaagcggtgaaatcatcatccttgggaacaagttcacccacacgtcatatgaggtgctggggaacatcggcagcatgattgaatatccgattttttatgaaaacctgacagctgaagaaaatttagatctgcattgtgaatatatgggataccacaataaaaaagccatacaagaagtgctggatatggtgaatttaaaacaaatcgacaaaaaacccgtcaaaaccttttccctcgggatgaagcagcgccttggaattgcgcgtgccatcctcacgaagccggacctgctcattctggatgagccggtgaatggtcttgaccctatcggcattaaaaagatcaggcaattgtttcaagtgctgagcaaagagtacgggatgacgctgctgatctcaagccacctgctgggtgaaatcgaacaaatcgcggacacaatcggcgtcattcgggacggcaggctgcttgaagaggtatcaatggaggatgtcaggggccagaacactgaatacatcgagcttgttacgccgaatcagacaagggcctgctttgtgctggagaaagagctgcaattaaccaactttaaaattttaaatgagaaaacaatccgaatttacgaggctgaagcctctcaggctgccatatccaaagcattgattttaaatgatgtagacattgaatcaatgaacaaaaagtatacgtcgctggaggattattttatcaaattgatcaacggcaatagcatcagtgcgtaaaggaggagagacacgttgatgaatttgatcagaatcgaattaagaaaaatgaaaatgggctggtatatgagaggtgccctcattgccaacgtgatcattatgggttttatgtggctgatcagttattccgaaaaagccgatggcggggtttcgttccaaagtacggatgaagcattcctcatcatcggcaccttcgtcagagcggtatttatcgtatttggcgctgtgctgatcgtaaaattggtgatttcggaatataaaaacaaaaccattcttgtgatgttcacgtacccgatcagccgtaaaaagctgctcaccgctaagctcatgatcgcgggcggactgacgtttatcacgattttactttcaaatatactcatagccgccggtttcttttggctgaactcgatctgccatttcataccgggagagcttacttccgagatcatttctcaacaggcggtcaaaatggcggttttcgcttttggcgccgctggaaccagtttagttcccatcttttttgggatgcgtagacactcggttccggcgaccatcatttcatctgtagtaattgtgatgctcatcagctcaacaagtccgggcttctcgatttcatctgttgtgtatatcccgttatcgttagcggcattcggattgttcttttcctacatggcgatcaggaatgcggacaagcaggatgcgtaaacaaaagcgcccaatatgtataaaaggccgatgctgtcagcatcggcctttccattatgagtctgttcttgtttcaagataatgcttcttgccaatctctttgctcatcatatagaaatggaagcaatattcaccgattgccatgacgatcgcgccgaataaagccgccaacgcaacttcaccgccagtcatccctagggaaagcggcatgcccatcagccagatcacaagaaaggccaagccaaaatcagccaaagttgcaatcatattattccatctcggcaatacataaagatcgcccagcaaataagaaataacccctaacacaatcgtcattagcagcgtatcaccaaacgtgaaaccaaagcccagaccaagcaccagatacaacacaataatcgtcataatacctttaatcgcgagcgctttcacatgtgtcattacaattcctccttttgtcatttgatttgttatgtataattcctcaaatgtaaaaagttaaaccttatttcttttcggaggcgggtgcaaatctgctggggaggggtcaatgatgtgaatccaggaattgaggctgcggcgcttcgacagcggaaacgtgaagcttgtactgcaccggacgctgctttgatgcccaacagcccattatgtttgctgtttttagatgaataaatttaaaaacttctcctgtccctccgtcatcacttctgaagtaatgaaatatgatgaaaagagatcaaggggaggtgacgtgatggcggtcgtgagagcaacgagtgcggatgtcgatttgatggcaaggctgctcagagcggaagcggaaggcgaaggcaagcaggggatgctgcttgtcggcaacgttggaattaatcggctgcgggcgaattgctcagattttaaaggcctccgcaccatcaggcagatgatttatcagccacacgcgtttgaggctgtgactcatggatatttttatcaaagggcgcgagatagcgagcgtgcccttgcacgccggtcgattaatggtgaaaggcgctggccggcaaaatttagtttgtggtacttcaggccggagggagactgtccagcccagtggtataaccagccgtttgtggccagatttaagtcacactgcttttatcagccgacggcggagacgtgtgaaaatgtatataacacattttagagacaggacaccgttcaaattgaacggtgtttttatttgaaaagatgcaatggaaaatattcctgtgagataatcgaagaaaaaagagctgacggagatgacagaatggcaacaattgacctgcaaaagaaaagtgtaaagatcgtactggagaaaaagcagttaacgaaggtgacggctcgtgtcggactggttcttgatattacgggatcgatgagaccgctctacaaaaacgggacggttcaaaatgtggtggagcggattttggcagtggctgatcagtttgatgataacggtttgctggatgtatgggtgtatgataatgaattttcccgattaaagccagtttcagaaaaggatttttcgggctatgtcgatcgtgaaattttaaataatgaccgcttgcataaattcggcagaaatgatgagtcgccagtcatgaaggacgtgctgcgcaaatatgttacggaggaaccgagctcgtatcctgctttcattgtttttatcaatgacgggggctgtaaaaagtcaatcaaaccgataattgaagcttcttctgataaaccggtgttctggcagtttgtcggcatcggaaacggaaactttgattttctcaataaactggatacgttagaagggcgtgtcattgataacacgaacttcctgcatatcgaagagattgaccgcatttctgatgatgagctttatgatgctctgcttgctgaatttccattttggctgaaagaagcgaaggaaaaagggattgtaagagaacaagagcctcctgctgaaaagccgaaaaagaagggctttttcagcagattgttttcgaaataactgataaggcactgagccattctgcgaaatggctcggtgtttttgtttttttaagatcatgtgaagaaaaatagtccaaatgggcggcttgcaaacgacaggatatgcagaaaacgcgtcattcagccagctttcggcatgttttagcggcaggcttgtgagggaagacctgtttttgatgttcagcgcttacaatcagttcacacttcttcacagtcgtttaacaatgatttcctataatggagacgatcaatgaggagagaggggatcttgaatggcatacgacagtcgttttgatgaatgggtacagaaactgaaagaggaaagctttcaaaacaatacgtttgaccgccgtaaatttattcaaggagcggggaagattgcaggactttctcttggattaacgattgcccagtcggttggggcctttgaagtaaatgctgcgcctaaattctcaagctatccgtttacattaggggtagcgtcaggtgatccgctttctgacagtgtcgtgctctggacgcgcctggcacctgatccgctgaatggcgggggaatgccgaagcaagcagtgcctgtcaaatgggaggtcgcaaaggatgagcatttccgcaaaatcgtaagaaaaggcactgaaatggctaaaccgagtcttgcccattccgttcatgtggaagcggacgggcttgagccaaacaaagtgtactattaccgtttcaaaaccggccatgaactaagccctgtcggaaaaacaaaaacactgcctgcccctggcgccaatgtgccgcaaatgacctttgcatttgcttcctgccagcaatatgagcacggatattatacggcctacaagcatatggcaaaggaaaagcttgatcttgtcttccatctcggtgattacatatatgaatacggcccaaatgaatatgtatcaaaaacaggcaatgtccgcacgcacaacagcgcggaaatcattacgctgcaagactatcggaaccgtcacgctcaataccgttctgacgccaatcttaaagctgcacatgcggcattcccttgggttgtaacttgggatgaccatgaagttgaaaacaactatgccaataaaatacctgaaaaaggacagtcggttgaagcattcgtgctccgccgcgcggcagcataccaggcatactatgaacatatgccgctccgcatttcctctttgccgaatggcccagatatgcagctgtaccggcactttacgtacggaaacctggcgtccttcaatgtgcttgatacccgccagtacagggacgaccaagccaataacgacggcaataagccgccttctgatgaatcgcgcaatccgaatcggaccctgcttggaaaagaacaggagcagtggctcttcaacaatttgggcagctcgactgcccactggaatgtgctggcgcagcagattttctttgccaagtggaatttcgggacaagcgcaagcccgatctacagcatggattcgtgggacggctacccggctcagcgcgaacgggtgatcaatttcattaaaagcaaaaatctgaataatgttgtcgtactgacaggtgatgtacacgcaagctgggcatcgaatttgcatgtcgatttcgagaagacaagttcaaaaatattcggagccgaatttgtcggaacctcgatcacatccggaggaaacggcgccgataagcgggcggatacggaccaaattttaaaagaaaatccgcacatcaagttctttaacgactatcgcggatatgtccgctgtacagtgacgcctcaccagtggaaagccgattatcgggtgatgccgtttgtgaccgagccgggcgcagccatttccacgcgggcttcattcgtttaccagaaagaccaaactgggttgagaaaggtatcatccacaacaatccaaggcggggtgaagcaatccgatgaggtcgaagaggatcgtttctttgcgcacaacaaagcccacgaaaaacaaatgattaagaagcgggcaaaaatcacgaattaaggagtggaaattatgttttcaaacattggaataccgggcttgattctgatcttcgtcatcgccctcattatttttggcccttccaagctgccggaaatcgggcgtgccgccggacggacactgctggaatttaaaagcgccacaaaatcacttgtgtctggtgatgaaaaagaagagaaatcagctgagctgacagcggtaaagcaggacaaaaacgcgggctgaatgctgatgaggcagacaccgggtctgcctctttttttatgaaagggagggcttttttgaatggataaaaaagaaacccatttgatcgggcatttagaagagcttcgccgccggattatcgtaaccctcgcggcattttttctatttctcatcacggcttttttgttcgtacaggacatttatgactggctaatcagggatttggatggaaagctggctgtgcttgggccgagtgaaatcctctgggtgtatatgatgctttccggcatttgtgccattgcggcttctatccctgttgccgcgtaccagctgtggcgtttcgttgcaccggcgctgacgaaaacggagcgcaaggtgacgctcatgtacataccaggtttatttgcgttgtttttggcgggcatctccttcggatactttgtcttgtttccgatcgtgctcagctttttgactcatttatcctccggccactttgaaacgatgtttacggctgaccgctactttcggtttatggtgaatttgagcctgccgttcggcttcttgtttgagatgcccttggtggtgatgtttttaacaaggctgggcatcttaaatccttacagactggccaaagcgagaaagctgtcctattttctgctgattgtcgtatctatattgattacaccgcctgattttatttctgattttctcgtgatgatcccgcttcttgtcctgtttgaagtgagtgtcaccctatcggcgtttgtctacaaaaagaggctgagggaagaaacagcggcggccgcttagtgcagcgtaccgcccggtgacttcacatcctcatcatattgtgcggccgtaacagcggcgattctcaatgcccggacaatcgtgtccaggctgaggctcggcgctgttttgtcgattgtttgctgcggaatgtaaggaatatgaataaaaccgccgcgaatgtgcggggatgtccggctaatgtgatccattaacccgtagaacaaatagttgcatacaaaggtccccgctgtgtaggaaaccgcagctggaatgccgtgttccttcatcttagcagttattcgtttcacgggaagccctgtccagtaagcggcgggcccatctggagaaatctcttcatcaatcggctgatgtccttcgttatcggggattcgcgcatctgcaaggttgatcgccacccgttccggtgtaatctgcatccgtcctcctgcttggccgacacaaatcacgatatctggctgatgtgtttgaatggcttggcgcagagtgcccagagcggatctaaagacggttggaatttgttccgctgtaataatggcttcttccgtctcgaagccattaagccgtttcgccgcttcccatgatggattgacggtttctttgtcaaaagggtcaaaaccagtgatcagcactttttttctcatcttctcatctcctttttcttttattctattgtttatttatgggtttttcatcaaaataatgtaaaggagtgaatcataatggagcatttaccgcagcagtatcgtcatttattcccaaccttgcagacgcatacgatgcttgccagctgttctcagagcgcattggcagagcctgtatcaagggcgatccaggattatcatgacagcctgctgtataaagggacgaactggaaagaagcgattgaaaaaacagagtttgcgagaaacgagtttgcaaagctgatcggggctgaaccggatgaagtggcgattgtgccgtcagtttctgatgcactggtttctgtagcatcgtccttaactgcatttggaaagaagcacgttgtatatacagatatggattttccggcggtgcctcatgtttggcaggcacactccgattataccgtatccgtcattccatcaatagacggcgtgctgccgcttgaacaatatgaaacgcatatttcggatgaaacagtactgacgtgtgttcctcacgttcattatcgtgacggctatgttcaggatataaaagcgattgccgagatttctcagagaaagggctctttattgtttgtagatgcttatcaatcagccgggcatattcccattgatgtgaaggaatggggcgtagatatgctggcagcaggcacccggaagtatttgctcggcataccgggtgtggcgtttctttatgtgagaaaggagctggctgacgcactgaaaccgaaagcatcagcttggttcggcagagagaacggatttgatggggcttatgcgaaaggcgcgcgtcgttttcaaacgggcaccccagcttttatcagcgtatacgcagctgcagcggctttatcgctgctgaatcatattggggtttctcatatcagggatcatgtgaaaacgatctgtgccgatgcagttcaatatgccgctgaaaaaggcctgcagctggcggcggcacaaggtgggggtcagccgggcatggttgcgatccgggatgagcgggcatcggaaacggcggcgttgctgaagaagaaaaaagtgatttgcgcgccgcgggaaaatgtgatccgtctcgctccccatttttataatacgaaggaggaaatgcggcgcgcgattgatgaaatcgcggcgaaaacgatccacaagtaaacataaaaaaagcccctgaacattagtcaggggcttttcatattaatgatctaccttcacgcgcttcataaagaaagcgccaattaaaccgataatggcaacaatcattgcaaacacaaatgcgtgctgtacacccgctgtcaaagcttgcgggatgactgccggatcggcagggtttttaactgtactcatataatcatgctggcctgcagccataatgctgaccgcaaccgctgttccgatagcgccagccatttgctgcagcgtgttcataatggcggtgccgtctggataaaattcgcgcggcagttggtttaaaccgtttgtctgtgcaggcatcatgatcatagaaatcccgatcatcaagcaggtgtgcaggatgataatcagcacagctgttgaagtggtcgtgacatttgagaagaaccatagtacaacggtgacaatcacaaatcccggaatgacaagccatttcggcccgtatttatcgaacaagcggcctgtaacaggggacataaatccatttaaaataccgcccggcaagagaacaagaccagatgcaaatgcagtgaggactaagccgccttgcagatacatcggcagaagcagcatagatgacagaatgaccatcatacaaatgaacaccatgatcacacccaaaataaacatcgggtatttgaacgcacggaggttcatcatcggctgcttcattgtcagctggcggattgaaaataggataaggccgacaacgccgacaatcagcgacacgataacagtcgggctggaccatcccccggagccttcacccgcgttgctgaatccgaacacaatgccgccgaagccaatcgtcgacaggatgatagacaatacatcgattttcggctttgtcgtttcagatacattctgcatatatgcgataccgaaaacaagcgccagcacaaggaatggaagagagatccagaaaatccagtgccagttgagatgctccagaaccaatcctgagaaagtcgggccgatggcgggcgcgaacataatgacaagcccgatcgttcccattgcggcgccccgtttatgaggcgggaaaatcaccaagattgtgttaaacatcagcggcagtaaaagaccggttccaagtgcctgaacgatccttgccgccaataaaaacgggaagcttggcgcgagtgccgcgatcaaggttcctataattgaaaagattagtgacacggtaaaaagctgtcttgttgtgaaccactgcaacagcagtcctgaaacaggaacaaggataccgagtacaagcaggtagcccgtcgttaaccattggacggttgccgctgtaatgttcaattccttcataaggtcggttaacgcaatattcagtgctgtttcactgaacatgccgataaaaccggccaacagcaaggaaatcataatcggcatcactttgtattgctgagatgctttagctgttgtttccaaaatcatttcccctctctatcaactgcatgtagtatgtcgtttttttatctcttcagcaggtcaggaatgcagctggagatatgaaggagcggcgtactgttttttgccgtcaaagataaaagaatgccgccttcaatcatcgcgttaaccacagtgctggcttcttttgcacggttctcgctgcagccagtctgccgcagtttttcctcatatacagaggcccattctttgtaggcttcatgacaggcttcgcgcaacggttcgcttttcaatgacgtctcagccgctagcaagcccacaggcaagccttcaatgtcttccgtacatgaaaactggcaggagagctccttcaaaaaggcttgaatgccttccgctggatcggtgcaggcttccatgcagtccgcgattttctgacggatatactccttcatctcattcacggcttcgatcgcaagctgttctttacccccgggaaagtggtagtaaagagagcctttaggcgcgccgctttcctttataatctggttcagccccgtgccgtaatacccttgcagctgaaaaagccgggtagctgccgaaaggattttctcacgggaatctccataactcataacattcccaccttactgaattgcaatcaaaaatatagtgactggtctattatcttgattcaatcatcaattgtcaagaaaaattcattgtatgaaaagacaaaaaaagaaggatatgacaacaaaaaatactgagagaaaagctgactgatcttttgactgaatagataaaatgtacaatgattaatcatcatatggatgtaaggagagaaatagatgaaaaaacaacgaatgctcgtactttttaccgcactattgtttgtttttaccggatgttcacattctcctgaaacaaaagaatccccgaaagaaaaaacgcagacacaaaaagtctcttcggcttctgcctctgaaaaaaaggatctgccaaacattaaaattttagcgacaggaggcacgatagctggtgccgatcaatcgaaaacctcaacaactgaatataaagcaggtgttgtcggcgttgaatcactgatcgaggcagttccagaaatgaaggacattgcaaacgtcagcggcgagcagattgttaacgtcggcagcacaaatattgataataaaatattgctgaagctggcgaaacgcatcaacgacttgctcgcttcagatgatgtagacggaatcgtcgtgactcatggaacagatacattggaggaaaccgcttattttttgaatcttaccgtgaaaagtgataaaccggttgttattgtcggttcgatgagaccttccacagccatcagcgctgatgggccttctaacctgtacaatgcagtgaaagtggcaggtgcccctgaggcaaaagggaaagggacgcttgttgttcttaacgaccggattgcctcagcccgatatgtcaccaaaacaaacacaaccacaacagatacatttaaatcagaagaaatgggcttcgtcggaacaattgcagatgatatctattttaataatgagattactcgtaagcatacgaaggacacggatttctcggtttctaatcttgatgagctgccgcaggttgacattatctatggataccaaaatgacggaagctacctgtttgacgctgctgtaaaagccggagcaaaggggattgtatttgccggttctgggaacgggtctttatctgacgcagccgaaaaaggggcggacagcgcagtcaaaaaaggcgtcacagtggtgcgctctacccgcacgggaaatggtgtcgtcacaccaaaccaagactatgcggaaaaggacctgctggcatcgaactctttaaacccccaaaaagcacggatgttgctgatgcttgcgcttaccaaaacaaatgatcctcaaaaaatccaagcttatttcaatgagtattgaagaaaagaaggcgaataagccttctttttttggctttttaggaccaataatgacctctgaatcttaaaatttctttaaaaataagccaaaattaccctttacttaattaatttggtaacgtaatataattgaagaatttgttacaaaaaaaggaggatattatgaaatttgtaaaaagaaggatcattgcacttgtaacaattttgatgctgtctgttacatcgctgtttgcgttgcagccgtcagtaaaagccgctgaacacaatccagtcgttatggttcacggcattggaggggcatcattcaattttgcgggaattaagagctatctcgtatctcagggctggtcgcgggacaagctgtatgcagttgatttttgggacaagacaggcacaaattataacaatggcccggtattatcacgatttgtgcaaaaggttttagatgaaacgggtgcgaaaaaagtggatattgtcgctcacagtatggggggcgcgaacacactttactacataaaaaatctggacggcggaaataaagttgaaaacgtcgtgacgcttggcggcgccaaccgtttgacgacaggcaaggcgcttccgggaacagatccaaatcaaaagattttatacacatccatttacagcagtgccgatatgattgtcatgaattatttatcaagattagacggtgctagaaacgttcaaatccatggcgttggacacatcggccttctgtacagcagccaagtcaacagcctgattaaagaagggctgaacggcgggggccagaatacaaactaatgagataaataaccttgaagagtcctattcttcaaggttattctgctttcagcacaatggttttcgccgccatatcatgaacggtttgttttttcttcgtaaatgcggctgtcaaatagatcaggcgggagaatacatgcacccacgctatgatgtaacggacaatcgcctgtaggaaagaaattttctcgtgtgtttcgtccctcacgatttgcagcccgatgatttttttgcccagtgtgcccttccaatttgtcagcggcatcagcaaaggatacacaatcagcatcaatatggcgacaataatgacaccagcggacccatcgccaaacgtaaatccggctgccaaaatcactgctgcggcaatgattacatcaagtaaaagagcgcaggcgcgcagcatgaaaccagctagttccaatagaaacactccttaaaatgttaaataaacacctaatgattgtaaaaaagaagggcctaaagtgggaataggtgataagccttaaatcacaaaagttggtgaaaatgtcataggtaaattggcataatcagccagcttatcacattaccaaattcttttttagcccgaaaccaagccctcagaagttatttttgttaaaatagaaaagttacaacagaattcggagggtttattgtgggaaaagtgaaacgaaatgccccttgcccatgcggcagcggcaagaaatataaaaaatgctgcggaagtaaagttgtcgacttcccggcggaactagcggcaaaagaagcgaaacaaattcaggaagacttagtggagtatgccttcacagtacatagagaaagcatttcaggctttatcaaccagcatgattttctttctgctatggacagacagacgaaagacatcagcgtatttaacttaggaatctggggaatcttcttccacccgcttgctggtgagaagacaatcttcgaagagtaccttcagaaaaaaggcgattcgatcactcgtccgaaaacgcgtgagatcgtagaatcatggcagagcatgacgcctgctttattgctgctgaaggacctgaaggaaggcatcattcactttgaagatgtcattacggcaaaacaattcgaagtggaaatggacgccagcaatcaagaccttcctccagtgggaagcctgattcttggatacccaatccacgaagcggaaaaagcagaattcttcatgcagttcacgatcttcccggtgaagagaacagaagcgctgatcagcaaggtgaagaaatatgcggatgccgctgtgaaggacggcaaaacgccggaggacttcatgaagcaggaattcaacaacgttctgttcgcgttgttagctgagaaagatgaagagccacaagcagagaaagcggaagtaagcactgttgagtgggcaaacgacttggagaaagaaaccgctgcggctattgaagaaggcatgagcggggaagagtatccgactgaattgatcccagctgttattgacatctggaaaacattctgcgagaaaaaatcacctgtcatcagaaagccggaagcttttgcggcggcagttgaatattatgtaaacgcaatttctcttaacggcgcgtccgtttcccaggctaaactggcgaaaaaatacggcgttagcgcatcaacgatttccagccgttacaaagaaattgaaagcacgctgcaagatgaagcagatcgttttgcacaagcgttatcctcataatggaaaaaaccttgaaaagccaggcttttcaaggtttttttatttctgaaacggaattttgatttctaaccggaagacggggtggcggtaggtaaaatccagcctgccaaaagcgctcttcaccagtttttgaatgatatatgtgcccatgccttcatgagcgccgtttttcgttgagcggccaaacgattgataaattgtatcgagcacttttgggtccatcccgggagtgctgttttcacaagtcagtacataaagtccgctgcgcagtgaagtttccagtttaatctctgctttttctcgggcctccgctgcgctgtcgagcgcattttctaatatgttgccgaccaagctgacctgatcagcaggcgaaaacggaagggaagaaagcggtgtatgcatatgcagcgaaacactcacattcgaggcgcgggctttttctaaaaaatcataaagcacccctgcaacgtacgcgttctctcctttcaaaaaacggtcatattggctgtattgatccgcccagttttgaatatatgcttgtgtatctgccttgggctgagctgatttgattgcagtgatatgtttcattgtgtcatgattctggcttctgacatcaatcagcatttgattggcgtgctgttcagcttgagtcagcttatcaatttgatcagaaagccttgcctgcaaagcagactgtccgatacggagcccttcacaccctgcaaatatcgcgattacacataataccggcatgatgtctgtgccaatcaacactactcccgccgacatcacttgaatcacagcaatccacgcacaaagccctgaggaacagtgtttccacacccgcttcgtattccaaatgtacaatcctgcagcagctgcgcctaaagcagcggcgagccaagaggcggctgtgctgtgtgaaaaagcagcagctccctgataacatatgaaactaaataaaaccagataaagacattgaaaaagggtaatcacgttctgaactcctcaaaagtagtagttttgaaaataatcaagctgctgcttggtgatcatcgcttttttagacgttccctcaaaagaaactgtaaatgaatgcttggtataagcggaaaaatgctttatgtaatgaatgttgataataaaggaacgatgcgaacgaagaaaatccttttcgggcaggtcgcctttaatatcatttaatgtttgatacgtttgcacctcttcggcggttgtcacaatcgtcgtcgaacgtcccgtccgttctgcgaaaataatatccttcttttgcaggacatgcatttcagacttttgctttatcaatatacgcccattcaaactcgtttccgttttctttttcaagtaccggtcgaaggaagcggccagacggtcggcatagtacggcttcataatataatcatggacgttcaggtcaaaggcgtgaaccgcataaccgccgtggccggtaacaaaaatcacatccacatcaagtgaatgggatttgatcaaatcagcaagctcgtagccagacatatggggcatctcgatatcggcaagcagcagatcaatgtctccgttctttacccgcctgtaggcttccttcgctgaatcggtggaaaagacaatttcgacgtcctgcattctggacacgatcgcttccagcttctctaaatctactcgataatcatctacaagtccgacttttaccattatcattcccctagttacatagaatcatctttattctatcccatttcgcgacataaaaagaactcttcgcgacaactttatccaactaatccagcttttcgtatatagtcattactagaaataaagataagggagattgtgacatgattacactgaccgattgcagccgcaggtttcaggataagaaaaaagtagtcaaagcggtgcgagatgtaagtttaacaattgaaaaaggagaagtcgtcggcattctcggagaaaacggtgccggcaaaacgacgatgctgagaatgattgcttccttgcttgaaccatcacagggtgtaatcacagtagacggctttgacacggtcaagcagccggctgaagtcaaaaaaagaatcggtgtcttattcggaggagaaaccgggctttacgacaggatgaccgctaaagaaaatctccaatacttcggcaggctgtatgggctgaaccgccacgagatcaaagcaagaatagaagatttatcgaaacggttcggcatgcgcgattatatgaaccggagagtgggcgggttttcgaaagggatgaggcagaaagtcgccattgccagagcgctgattcacgatccggacatcattttatttgatgagccgacaactgggcttgatattacgtcaagcaacatcttccgcgaatttatacagcagctgaaaagagaacaaaaaacgattcttttctccagccacattatggaggaagtgcaggcgctctgtgacagtgtcatcatgattcacagcggagaggtgatttaccgaggggcgcttgaatcactatacgagagcgagcgcagtgaggatttgaattacatctttatgtctaagcttgtcagggggatttcttaaatgctgagccatatttataaaaaagaaatgatcgacgctttgcgcgacagaaaaacgattttactcacaatcttagtgccgatgattatgatgcttggacttgtcttcttttatgaaagcatgctgtccgacaaaggggagcagtacacgctggctgtcggccattcgctgccgcccgcactggaaagcaagcttaatgagattgacgaaatcagcgtaaaaacatttgcaaagcctgaagaggcagttgatgaaggaaaagcagatgcctatctgaacgtcccaaaagagttcgactcatatgtcaacagcatgacaccttttaaggttgatgtttacggcaattcaatcgatcaagggtcgtcaaatgccatgcagcttgtgcagtctgccttagatcagtacaaaaatgaaattgtgcagcaacgtttaacaaataagcatattgatcaatcggtgatccagccgtttacaattcagcaaaaggaagcggatgaggagaaagggacttccgctattatgctttccgccattctgcccatgctgattctgacttccattgtttccggcgcaatgccgatcgctcttgatatcatggccggtgaaaaggaccgaaagtcaatcgaggcgctgctattaacgccagtcagcagaaacaaaatgctggtcggcaagtggcttgcggtttccacttttggcgtggcttcaggtgtattggctttgatgtttttgattttgtccaccgtgttatttaccgaaaatttaaaaacggccttccagctgggagatcatatgtggagtgtaatcggcgcttcagccttaatcattgtgctctctgcattgctgatatctgcgatggagcttttcatcagcatcatgtccagctcggtaaaagaagcgcaaagttatatgtctctcgtcgtctttctgcctgtgttcccgatgtttttcatcttcagcaaggcaccgaaccaatttgacttatcatactttctcatcccgtttctgaacctgcatgcgttatttaaacagcttttattcgggatggttgacccggctgccattttgtctacgtcaggaaccatcgccgtgctcatcgccatcttctttttactagccagagcctgcttcctgaaagacaaatgggttcttccaaaataaacttgcgaaaggagaaatacactttctcctttttgtatatcctgaaaaaagaaggaaaatagaaaaaggatatctaatacaaaaagtgaccctgcactatttttcatcaaaattggtttcaaaggagaaggaacaatggatcaaacacgtacactcggcaaaacgaagctgaaggtgaagcggatcggattcggcgcgaatgcggtcggcgggcataatctatttccaaatctaaatgatgaaacagggaaggatttagtgcgcacggcattggatggcggcgtcaattttatcgataccgcctttatatatggattggggagatctgaagaattaatcggcgaagtcgtacaggaacgcggcgtgcggaatgagctcatcatcgccaccaaaggagctcataaagaagtggacggcagcattgaattagacaatagccgggagtttcttcgcagcgaggtcgagaagagcctgaagcggctgaaaacagattacattgatttgtattatgttcactttccggatggaaaaacacctctcgctgaagtggcgggcactttgaaagagttgaaggatgaggggaaaatcaaagcaatcggcgcttcgaacctcgattatcagcaattgcaggattttaatgctgatggctatttggaggtcttccaggccgaatattctctcatacagcgtgatgccgagaaagagcttcttccatactgtgaaaaacaaggcatctcctttattccttactttccgcttgcgtccggactgctgacaggaaaattcacgcgagacacagtctttgatgatttcagaaaggataaacctcaatttcagggtgaaacgtttatccacaatctcaaaaaaatagataagctgaaagcagtagcggaggaaaaacaagcggatacggcacatgtcgccttggcgtggctgttaacgagaccggcgattgatgccattattccaggagctaaacgacctgagcaattacaggataacctgaaaaccttgaacattgaactcaccgaagacgaagtgaatttcatcagcgacatttttaaataaaaaggaaatagccgtcaaggctatttccttttggtgttttattctttgatgaatgcttcgactaattctgctgctctgtaatcatccatatcaagctgccattggtcgatgtcatttttcttcattttcacttcaactgttttttcagatgaagcaggtccaagctttttaaattcctcagggtagacttgaagcgcgtatttcactgcctcttcatagctggcactagagtttttactgtagtagtctttcactttgtcttcgatacggtctgaaagagaagatgcatctacaggtttaactgttgcttcaacaattgcttcgtctttagagattgaagtcgtttttgcttgaatggaagagtttttgcttaatccctctttaatgccgttcacgatattatcaagcgctttgctgtccgcatatgtgctggaaaggccggaagctgagagataaccgtctttggctgattcattgaaatcatttacaatttcatttttgttagcgccggtgattttttcgaaatcggcgttatctttgccgaaaagaaggacatcaacataagctgataacgcttttgcagaatcttggagcttatctgccgtcgccaggatttttttgtcttttccgtcaattttaaaagtaactgattttggctttttatcaccgtaagattccggcgtatagttaagctcgtattgcttgcctttatctacaacgaagaaaagatttccttcaacggatttgtcagcgttaatcgtgctgccttgaagcttttcgctatagtcttcagggtctgtgtcagacattttggtatcaccttgatacaatgtgaaatccatactgtctacattcagcgggtcttttcctgtgtttttcaccgcgacattgacttttaacacaagctggtcatctgaagtggacttatcatatttagacggaagtgtgtaagagacatccttgattttgacttgagctatatctgagcttttttctgtttctgattctttcttctccgcgcttgttttgctgccggaacaagcagctgtaaacatcatcagcagaagaattaggaaaacagcgtacgtttttttctgaaacattcatttttcctcctcaaatggtttaggaaaggggagtcttttgtctttgagaaatggatctttttgaatggattagcatcatataaccaaaaaaatcagttcttttctcacggtttttaccggattttctggaaactccgccctcctttgtcatgaatggacctataaaaagttacaacggaattaattttaagattattagcttttatattgaataggttcatcatcctatttttggtgaaaaatgttctggtaaaactggtaaactcagaaaactgtgtattttagactattactttttgattagttggagggaacttaagaaggatgaaaggggctgcctttgtgaagaaagagggactgaaacaaaaagcactggaaatcggccgggtgccgacacacttaaaactggaaattgaagattatggcggtgatgacaaaagagcctatttttgttggagagatcctcaggatgagaatatcggcattatcgtggaacttggaccggacggggagctggaatccctttcccgtgatattgagcctgaaagcggagaaaggctgtctgaggagaaactagaggatatcatgcgccaatttgtcgagactcatcatccgggggcactctctgcctttgttcgtgaagaaaatgaccgtgcatacggcgataaagtgagattttcatatgttcaaatggaggctgggcttcctctccccatgagcggatttatggctgatgtttccttatcaggtgagatcgtttacttccgctattacggcgaagcaggcagcatcatcaagccaaagagggtcgcggatgttgaagaggcacttgcctttatcaagaaggacgtagagttcgaccttttgtttgaggttctccatcgttctgtttacaaaaatggagatgatcagccacatttggtgtatgagcctgaatgtagggcgattaccgtacctgcggatttggttcaagaagaacaaggaggagttgatgatgacgataattacagggagcctgagagctttcctctccctttattcgagggcatccgcgaaaaggccgatcctgacagcatgattggtattgaaaatgggtttgtcaaagagcgggaagcggatttgggagatgggagaatcggaatcgtttggcggaatccggatgaccctgtgtatcagccggcggataaaagcatggacagctggtttaagggacggactcatcaagtgctgaaaaccatctataacaaagaaaccggaaaactcgaaggcgtcatgtcatttatggaggaaaaagggccgctgacagtaactttggcagagtgcgaaaaaattgcgcttcgctttctgtttgctttatttccgaatgccgatcaatattttaggatcagatacgatgaaaaggatgaagaagaaaacgcagtcactgtttttacatttgaaacgcattgtcacggagttccgctccgatttgggcagatcaaaatttgtgtcagccgccagacagggtatatcaccgtttatatgggaccggatattgacccaaatgagctggcaaccattgatcctgtgccggccatttcagttgaacaagccaaggctatcttttggcagcattttaaagttgagcttggctgggaaagagagtacggagatgatgaagaacacagctaccggctcgtctataagccggtgtatccgcgttttatcgatgcacatacaggagagcctgtcttcagctcatggtaaaacagccaaaagtcacgcaattgcctcaggtatagaagagagtacgtgatgaaagtaacagaaagaatctcgaaaaacaatgacaataatagaaaaggacctttcttcactttaaaagaagaaaggtctttttatataataaacaggattctctttgtcgtagactctttgaaagggatgacttcattggttaataaacagctgaaaaagatggcgcaggagatcggaaatgtaccgacgcattatgagcttgagatagaagattacgaccaaaagcaaaagaagaacgggcaggcatattttatctggaaggaccctaaagatccggaaaggcacattacagttgaacttagaaatgacggcgctttgctcaccttttcaacaactgtccgctccgagacagacaaaaaacttccagatgctgagctgaagctgacggctcttcagtttgccgctgcccatcatcccggcacatttatgaattttcattttcaaggcaaggaagaacgggggcagcacatccggtttgtctataccaaaatggagctggggcttccgattcccaattcaggctttttaattgatatgacacgcagcggtcagattgtccactttctatattacggggaagggcataaagccgaagttccgacggaatttgtagcaaaagagaaggttgtgtcccattacttaaacacaatgtcttttgagctgatgtacgatgtcattgatggcgaacaggaaccaaggcttgtatatgaaccgattctcccgggatacagctatcccgcagatgtagacgaaattgtgcccgatcagcatatcgcagatgaaagaatagaaaacacggcgtcactgccgccgcttcagaacaaggaagaagttgatatatttgccttgctgggttttacctctgatatgcagaaagtcagtgaaagagactttggggaacaaattggaagcacgtggcgcaggggcgctgcgccggagcgtaaggatttaagcataggaagctattttgaaacgagaaataaaaacacaatcaaaatgaagacggataaaagaaccggaaaattaaaagcagcgctttcttttatggagcggccgaacaaccgccaatgctccacggaagaatgccaagagatagcgcttcaatttttgtatgccctctatccgagagcggctgagtttttcagggtgaatcccgtccgaattgatgaaagagggagagtccgcaaccatttttctgtctggtataaaggagtgccgctgcggttcggcgctgcccgcatcattgtcaatccggaaactgggttgattgacgcttttatggcgcctgatattgaacctgaacaattggaagcgataaatcacaggccggatgtttccgctgaagaagcaagagaagcgtttttagccgcttttgatgtgaagctggaatggcagcctgattttacagcaggcagtgaccagcactacaaacttgtctataagccggtttacccttcatatattgatgcgcacataaggaaaaagaaaaggctgtgaggggtgtctagttaggaatcatctccaagtgggggtagtccttgaatcgtttccaatccccgccccattcaaaaccgagtgtcttagcgatctcgacaacctccagccaatctgattttccgttttgattgccgtcatattccatatcccatatgatgcttccatcctttttttgaagggcgaaatcaatcgctaaaccatagttatgatacgattcccctcctcttgcataggtgacaatattccctttttttgtacgtccctgtttatataattcatcttgttccttaaaggacctgaatccttcagtaatgacgacggtaatgcctttattcgctgcagcggctttgagtgcatcggcattctgcttcacaatcggatgaagatccgaggggacaggcatgtcctgcagggcgttttgagaatgccattcatgccgaatataactaaaacaaagatctagaagaaatagaatacataagataacaaatgtttttgcgggtaacttcatatcggtctcactttctcaagatgtgctgaatgtgaacgcttttaagtgattgactctctctaaaagcgaacagctatgataaaatataacataaatagtagcaggaggaaggaggcagaccgatgagagcaaagattccatcagaagaagtagcagtaaagctgaatgaatggtacaagctcattcgcgcatttgaagcagatcaagcagaagcgttaaagcaggagattgaatacgatttagaagatatggaagagaaccaggacttgcttttatatttttctttgatggaattccggcatcgaatcatgcttgataagctgatgccggtgaaagacagcgacaccaagcctccgttctctgatatgctgaacgaaattgaaagcaatcagcaaaaactcacgggcttattggaatactacttttattatttcagaggaatgtacgaattcaagcagaaaaatttcatattagcgatcgaccattataaacatgccgaggaaaagctcgagtatgtcgaggatgagatcgaaaaagctgagtttctttttaaagtcgcagaagtgtattatcacatcaaacaaacgtatttttccatgaattatgcgagccaggcgcttgatatctatacgaaatatgaactgtacggtcgccgccgggttcagtgtgaatttatcatcgccggaaatttgaccgatgtgtatcatcatgaaaaagcactgacccacttgtgcagcgctttagatcatgccaggcagcttgaagaagcatacatgatcgccgctgcctattataatgtcggacactgtaagtacagtctgggtgattacaaagaagcggagggctatttcaaaacagccgccgccatttttgaggagcacaactttcagcaagctgttcaagctgtattttcactgacccatatctactgtaaagagggaaaatacgacaaggcagtagaggcttatgaccgcgggataaagagcgcggctgaatgggaggatgacatgtacttgacgaaattccgcctcattcatgagctgtatcttggaagcggcgacctgaacgtgcttacagaatgctttgacctgctggaatccaggcagcttcttgctgacgccgaagatctgctgcatgatacagcggaacgtttcaatcagttggaacattacgagtccgccgctttcttttaccgcaggctgatgaatattaaaaagaagcttgccgagcagcgttttcaataggaaatggcagagaactacaggttctctgctttttttgtgctgttttcaactcggaaaaacagggtattttccactgcatagtgagaaacagaggaggatatcaagtatgtacaaagatttaaccggaaaaacagcgattgtgacagggtcttcaaaaggaatcgggaaagccattgcggaacggttcggacaggagagaatgaatgttgttgtaaactaccacagcgacccgtctggagccgatgaaaccctggaaatcattaaacagaacggagggaaagccgtcgcagttgaggcggacgtgtcaaaagaagaggggattcaggcgctcttggacacagctttagagcatttcggcacgctcgatgtgatggtaaacaactctggttttaacggcgttgaggcgatgccgcatgagatgagtcttgaagattggcagagagtgattgatgtcaatgttaccggaacctttctgggagcgaaagcagcacttaaccacatgatgaaaaacaatatcaagggcaatgtgctgaatatctcaagtgttcaccagcagattccgcgccctgtaaacgttcagtattccacatccaaaggcggcatcaagatgatgacggaaacgctggcgctcaattatgcggataagggaatccgcgtcaatgcgatagcgcccggcaccattgccacagaatcaaatgttgatacgaaaaaggaagagagcaggcaaaaacaattgaaaaaaatcccgatgaaagccttcggaaagcctgaagaagtggcggcagcagcagcttggctcgtatctgaggaagcaagctatgtgaccggcgcaacacttttcgtcgacggcggaatgacactttatccatctcagcttgaatagaacacaaaacagggggattgcgggatgaaaacggactggtggaaggatgcagtggtgtaccaaatttacccgagaagctttcaggacagcaatggagacggaattggggacttgcgggggattatttcccgtcttgactacataaaggagctcggggcagatgtgatttggatttgcccgatctatccttctccgaatgttgattacggctatgatgtgacaaaccataaggcgattatggattcttacggaacaatggacgattttcacgagctgctggaccaggtgcatcagcggggattaaagctggtgatggactttgtgttaaatcacacctcggtcgagcatccgtggtttaaagaagcggagctggacaaaaacagcaaataccgcagctattattattggcgtcccggcacaaagaacggcccgccgacggactggctctcaaactatggatgcccggtctggcaatacgaagagcacaccggagaatactatctccatatgaatgccgtcaaacaagctgatttaaactgggaaaatcccgaagttcgccaggcggtgtatgacatgatgaaattttggctcgataaaggggtcgacggtttgcgaattgatcagctccatctcatttctaagaaagaatatcttccttcgtatgaggactatatcaatcagcaggcagagccgaagccctttcagccaaatggcgaacaaatccatgactatttaaaagaaatgacagatgaagtgttttcccaatatgatgtcatgtctgtcggagaggttggcagtgtcacaccggaagaaggcctgaaatatacgggaacagataagcatgagctgaatatgatttttcactttcagcatatggagcttgatcagcagcccggaaaagaacattgggatttgaagccccttgagctttctgatttaaaatcggttttgacaaaatggcaaaagaagcttgaacatcaaggctggaatacattgttttggtgcaaccatgaccagccccggattgtgtccagattcggagacgatggggaataccgcaaaacatcagcgaaaatgctggcagccgtactttattttatgaagggcacgccgtatatttatcagggagaagaaatcgggatgacaaacgcgccgtttacccggattgaagactacaaagatatccaaacgatcaatatgtatcataaacgggtgtttgaaaaaggctatgatccaaatgatgtgatgagatcgatcttagccaaaagccgggatcacgcccggaccccgatgcagtggaacagcggcaaaaatgccggatttactgacggcacgccttggctgaaggtcaatccaaacttcaccgcaatcaatgtggaggaagcgcagggagatcctgattcggtcttaatctattacaaaaagctgatcagcctgagaaagcagtacgcggacctcatgaaagggagctttgatcttttgcttccggatgatccgcagttgtttgtatacatgagagaaaacagtaaacagcagcttttgtcggtcaataatttttcaaaagagcaggctgtttttcagtggcccaagaactgcggcaaagctcaggcctctctgcttctcagcaattataacaacgatgatcttgctgacgaaatggtgttccggccttatgagagcagggtctatcttctggacaaaacaaactaatgattgaagtagcccggcatttttagccgggttttttagtacatatattcgctctgcaggcgggaagaataaatgaaaatgaaatttattcttgcaaaacgtaatgacttcggtttattatgatataggattacaaaatcgttatcattttgatttaaagtttctgaaaaagaggggatatacgatatgtttaaaaaatggagcggtttgtttgtgattgcagcgtgctttttattggttgcagcatgcggcaactcatcaacaaaagggtcggcggattcaaagggtgataaactgcacgttgtcacaacgttctacccgatgtatgaattcacaaaacaaattgtaaaagacaaaggcgatgtggatctgttaatcccatcttccgttgaaccgcatgattgggaaccgacgccgaaagacattgccaacattcaggatgctgatttgttcgtttataatagtgaatacatggagacatgggttccgtcagctgaaaaaagcatgggccaaggccatgccgttttcgttaatgcaagcaaaggcattgatttaatggaaggctctgaagaagaacacgaagagcatgatcatggggagcatgagcacagtcatgcaatggaccctcacgtatggctcagccctgttctggcacagaaggaagttaaaaatattacggcgcaaatcgtgaagcaggacccggataacaaagaatactatgagaaaaatagtaaagaatatattgcaaaactgcaggatcttgataaactatatcgtacaaccgcaaaaaaagcggagaaaaaagaatttatcacgcagcatacagcttttggctatctggcaaaagaatacggcttgaagcaggttccgattgcagggctttcacctgaccaagaaccgagcgcagccagcttggcaaagctgaaaacatatgccaaagaacataatgtaaaagtcatttactttgaagaaattgcatcctcaaaggtcgcagatacgctcgccagtgaaatcggcgcgaagacagaagtgctgaatacactggaaggcttgagcaaagaagaacaggataaaggtttagggtatatcgacattatgaaacaaaacctcgatgccctgaaagattcactattggttaaatcataagatagtgtgcgccggagggtgcacactatttctttgtgagaaaggaagattaacatgaatctcgtctcattgaaagatatcgttttcggctattcccatacgcctgttttagataaagtatcacttgatattgaaagcggtgagttcgtcggcatcactgggccaaacggcgcctctaaatcgacgctcataaaggtaatgctcggcatgctgaaaccgtgggaaggcacagtgacgatcagtaaaaggaatacagaagggaaacgcctgaccatagggtacgtcccgcagcaaatttcttcatttaatgccggctttccgagcacggtgctggagcttgttcagtcaggccgctatacaaaagggaaatggtttaaacgtttaaatgaagaagatcatcttgaagtagaaaaagcactgaaaatggtggaaatgtgggagctccgtcaccgtaaaatcggtgatttatcaggcggacagaaacagaaaatctgtatcgccagaatgctcgccagcaacccggatctgctgatgctggacgaaccgacgacagctgttgattacgacagcagaaaaggattttacgaatttatgcatcaccttgtgaaaaatcacaaccgcacagttgtgatggttactcacgaacaaaacgaagtacagcaatttttagataaagtgattcgattagagagaggagaaaaaggcggatggaaatgtttgacttggaattcatgcgacgagcttttctagcaggcggcatgatcgccgtcatggctccgatactaggagtgtatctcgttctcagaagacaggccttaatggctgacacactttcacatatctcattgtcaggtgttgccatcggcttttttctcagcaccaatataaccgcagcaagcatagtcgtcgtgaccatcggggcgatcggaattgaatacatgcggcgggcgtatcggacttattcagaagtgtccattgccatcttaatggcagctggtttgtccttcgcgatgtttttaatcagcctttccaaaggcacagccaatatgagcatcgatcaatacctatttggatcgcttgtgacagtaaaccagcagcaggtctatattatcagtattatcacactgctgatcctgctttattttatcgtactgagaaggccgctctacctgctgacgtttgatgaagcaacagccaaaacatcgggaatcaatacaaacgttctctcgttgtcattcagtattgtcacaggccttgcgatttcagtcattattccgatcatcggggtccttcttgtatcggccctgctcgtattgccggcagcattcgccatcagaattgcaaaaggctttaacatggttttcattacagccatactcatttcattattcagcgtatttacgggactgacatcatcctatcagctcgggacgccgccaggtccgtctattaccctgctattgatcgttttgctattaatcggatttgcagttcagggagtttggacgtttatcaaaaaagaagctcagcgcaaaaaaaggcaccgataacatgaaaagcagttttccctagggaaaactgctttttttatagaaacaatccggcaaggcgctcataagattcttttttcgcctcaaaatcaaacacattgcacagaaccatgatttcatttgtttcgtagcggcctgtgaggtctaacagctgttgtttgacagtggttggagaaccgatcaccatccgctttctgttttcttctatgagttttttatcggacgctgtgtagggataggctttcgcctcctcgatgcttggcacgcggctgtccaagccttttccgacgcgaagaagccacaaatcctggcttaatgcgagttcttctgcctcttcatctgttttcgcgcaaatgacaaaaatcgtaaacagtgcggacggattcgaaaaatgggctgagggccgaaagctttcccggtagatgcggaatgcattttctcctcgctcgggattaatgaaatgcccaaatacatatccaatcccctgttgcgccgcgcgtcttgcgctgttttcaccaagaccgagcacccatagctcgggtgccgtgtcaataaggggcgccgctttgattccggcatacggatggtcgggaggaagggaatctgttagaaaataagagacatcctgcagctgtctgttaaattcggttaagctttttttcaccccgtccgttaatgcaagcctggtttttgtcgtgccgccgggggaacggccgacgccgaggtcaatccggtttggatacagggcctcaagctggcgaaaggtttcagccactttaaatgggctgtattggggcagaagcacgccgcctgatccgacacgaatggtgtttgtctgtgctgcgatgcgggcgatcatgatttcaggcgctgtgcttgccagtcctttcgtgctgtgatgctcggcaaaccaataacgcttatagccccactcttcactaaatcgagcaagctcaaccgaatgctgaagagttgtcacagggccctctcctttagaaacaggagcctgatcaagtatgcttaaatgaatcaaaaggccgcttcctttctgtctgtttttagatggtgacaccagaataggcaaaatgacttgcccgcgtcaaatggtttgtttaagaagcgcactttatagcatttgcaaatcatatatcaaatatggaagttttttttcgaggtttttcgtcaattattcttaacttttacgaaactttgatataataacaaacgtatatattagtaatttacggcttattttccttgtgagcgtaaaaataaatgtgactatcttcacattttgatgagtaggagtgaatcgtgtggcaatttctttagaaaaaggtcaacgaattgatttaacaaaaggaaaagccggtctgtcaaaattgatggtcggtctcggctgggacccagtgtcctcaggcggagggttcttcagcaaactgcttggcggaggcggtccgaatatcgactgtgacgcttcagtgctgatgttggaaaacggaaaattcaccgataagaaaaacctgatttatttcggcaacctgaaaagccgctgcggcggtgtacagcatacaggcgacaacctgacgggtgacggtgcgggcgatgacgagcaaattatgatagatttagataaagtgcctgcaaacatcgataagcttgtatttgtagtaaacatttacgattgtgtcagaagaaaacaagatttcggcatgattcaaaatgcgtttatccgcgtagttgatcaatctaatcacgaggaaatgctcaagtacaatttgagagacaattacgccggcagaacaagcctgattacagcagaaatctaccgcagcggcagtgagtggaagtttgcggcgatcggtgaaggcacgaacgatacgagattagaagatattatcagccgatacgtataaaagaaaaggagtggatgaaacatgacaatttcattggcaaaaggacaaaaagtagatttaacaaaaacaaatccgggtctttcaaaggttgttgtcggtttaggctgggatacgaacaagtatgacggcgggcacgactttgatcttgactcaagtgtgtttctgttagacgccgcaggcaaatgcgcgtcaccaaacgactttattttctacaaccagcttgaaggcggcaacggttcagtcgttcattcaggcgacaacctgactggtgctggcgaaggcgacgatgagaatgtaaaagtaaatctcagcgctgtaccggcaaacattgataaaatctcatttgttattaccattcacgatgcagaagcgcgcagccaaaactttggacaagtatcaaacgcgtttgtccgcatcgtaaatgaagaaacaaatgaagagctcatccgttacgatcttgcagaagatttctctattgaaacggcaatcattgcaggggagctttacagacataacggcgagtggaaattctcagcaatcggctcaggctaccaaggcggccttgcccgcattgcaacagactacggtttgcaagtcggttaagacaaatacgaagagcagaaaggagagaggcagtatggccattcaattatcaaaaggacagcgcattgatttaacaaaaacaaatccgggactgactaaagcggtgatcggcttaggctgggatacaaacaagtattccggcggacacgattttgacctggatgcttcggcctttttagttgatgcgcatgataactgcgtaaatgatctcgatttcgtcttctataataaccttgaacatccgagcggcggtgtcatccatacgggtgacaaccgcacgggtgagggcgacggagatgatgagcagattatcgttgatttctcgaaaatccctgctcacattgagaaaatcggcatcacagtgaccattcacgacgctgaagcacgcagccaaaactttggacaagtttccaatgcatttgtccgcgttgtggatgaagaaacgcagaatgagcttcttcgcttcgatttgggagaagacttctccattgaaacagctgttgtcgtttgtgagctttacagacacggcggcgagtggaaattcaatgcgatcggcagcggattttccggcgggctggctgcattgtgccggaattacggtttgcaagtgtaagcgagtgacaaatagagaagtcaccgtttcaaattaataggaggaaaaaacttggactttttacatcatattttgtctacgtatgcttcatttttcgattggaaaatgtggggggaagttctgactgatcctgtttcctggggtttgatcggttcccttgttgttctggaaggccttttatcggccgataacgcgcttgttcttgcggtcatggttaaacacctgccggaaaaacagcggaaaaaagcgttaacgtatggtttgtttggagcttatattttcaggtttattttcatcgggctcggtatgcttctcattaaattctggtggatcaaggtgcttggcgcgctttacctggcttggctcgtcattaagcacttctggattggcgaaaaagaagaggaagcggacggcatcaagaaaaactcttggatggtccgcacgttcgggatcttctgggcgactgtcatttcagtagaattaatggatcttgccttctctgtggacagcatcctagccgcgtttgcagtatctgaaaaagtatgggtgcttctgatcggcggtatgcttggtattttaatgatgcgtacagtggcaaaagtgttccttgtgctgattgataaaattcctgagctggaaaacacagcattcgtgttaatcggcattatcgcgctgaaaatggcggggagcgctttccattacgaaatgccgcactctgtattcttcattatcattatcgctgcatttgcggtaacattgatcattcactacatcaataaacaaaagcaggtgcgcgaacaaacagccgcttcaaaagaagaataaaacaaaacaaggagggaggttcaatgtccttccttttttgttaccgaaatatcgttcaatgacaaaccggaaaggaggatatgatgagacaagaagaactaaccattcataaagcacttccggctgatggcgattggaaaagcctgctgtttcagccattgccggagcgggatcactatgaaactgcacaaggcctttctttttctcgtcttgccggtcagatattgggcacgcctattgatgagacggactactataacgagctatatgagctgtctgtaaacgaccgcataacgattttgagtgaaacgcttgataaaacaatcgaaccggaaacatttcaaaagcttcagcatattcattccatcaatcagaaagaaaaagggctgtcagtcagccgctttgttgcctttctggacggggaaaagctgattgcgaagcactcaaatcccctgatgcaccgccatttaagaaaagcgctgatgacgcttttacatacctttgcggacagtcatgaaaaggggctgaatcatcctgattttcgcagagtgctgcttgatgtctcgaagttttccttaaaccatctgaacccttggctggaaaaaaccgatatagagcgggagatgccgaaggttgtttggtatggagatgcgacgaaaagccagctctatttcttatattatctgatgctggtcggctgtgatgtactgctgttccatccggcgggaacggatcagctggcgcttgtcgacccgaagcaggagctcggttttacggaaaagctcccggatgtttcggagcttcagccgttcccgaaagaaaaaccagaccggaaatcaacagtggcttaccgctcaacaaaggaaattgaacatgtgctgaatcacgaggaatccatgctgtataagccgtggcagttcagagatcacacaccggtgtccgttacgctgaaaacgacctatgatgaattgtttttaatcacgaaagaacgcgcctttattcggccgaatttcaaagctgataaacattcaattgagattccgaatgtattcgccaaaattatgggcgtgtcgaaagacaataaggaatattggaacaggcttcatactctagcggattatcaggaaacagaaatggtcagaagctttccatttacagaagaaataaagtcgaactatcaatttcactacagccacgcacttgatcaagaagggaacattgatccggacaagctgatggcaagcaatgtgtggcagtacaaacagctgccggcgggcgttcagactgccattgccaaaacgatttcgagaatgtgcaggcacccgcggcttaaagctttgcatcaggaacaagtcaaggatgttcaaatctatttgtttaaacaaacaacaaatctgcctgctaatctgctgaaattgattcaaatgttcgactatgcgcaaaccgttccgaaactcgttttatatcatacggaaatgagcggcggactcacgcgttcggatgctgctgccctgctgttcctgaatgaaattggaatcgatatcatcatttataatccgcccggacaccaagatattgagcagtttattgaagatgaccagtatgatatccactggctggatgacatggtgtttcagcaggactacaaagagccttcgcttgtgaaaaggctcttcagaaccattacccaaaaataaggagagaagaaaagcatgacaacagaaaatcaaaatccgcttgttctcgataaaaatgaagagatttcccagcaaaaagctgacgatatccgtcttcagcttcgtcaggaaccagaagtgaagcggcttgctcaacaaattgacgtcaaaaaccaaatggagctgcttgagtacggcaaggagccggccgttgaaatatccaagttctctgaccgcatcttagggatgatgaaaacaacaagcgtgacagactccggcacaatgctgactcagcttgggaaaatcatggaccgcttcgacaaaaatgattttgatgagccaaagggattaatggcgaaaattttcaaacgcggcggcagcatgattgaaaaaatctttaaaaagtatcagacgcttggcggagagattgaaaaaatccacgttgagatttcaaaatacaaagatgagatgacgaagacgaactacacgctcgatgaaatgtatgaaaacaatatcaaatactatatggagcttgaaaaatacgtcgttgccgggcagatgaaactggaagagatgcagtcgatccttccttcatatgaggaaaaagcggcaagcgggaaccagctggcgcaaatgcagctcgatacgttgcgcaacggcattcaggcgcttgaggaacgggtgtatgatctggatatggcacggatggtggcgcttcaaactgctcctcaaatccgtctcctgcagcgaggaaatgcaaagctgatcgggaaaatcaactccgcgtttatcattaccattccgattttcaaaaacggcattattcaggctgttacggtaaagcggcaaaagcttgtggctgattccatgagcgagcttgaccgccggacaaacgagatgctgaaacgaaatgctgaaaacatctcgagccaaagtgttgaaattgccagaatggccggcagaccgagcatagatattgaaacgatcgaatcgtcttggaacacgattgtcagcggcatgcaggaaacaaaacaaatcgaagaagaaaacaagcgcctccgcgaagacggcgcgagacgaattgcacagcttcaggataatattaaaaaagcagcattgcagcaataagaaaaaccccgcttgtggaacataagcggggtttttcaattacatcatttagttaatgacaatgtgtaaagacaggtgtaaacttaaacggtaatcattttgcatatcagaggtgttggcaatgggaaaacaacagcctatatcccagcgtaaactgctgggcgtcgccggtttggggtggctgtttgatgcaatggatgtcggaatattatcgtttattatcgccgcgctccatgtagagtggaatctgtcgcccgaggaaatgaaatggatcggaagcgtcaattccatcggcatggctgcgggtgcgtttttgtttggtttgcttgctgatcgaatcggccgcaaaaaagtgtttatcatcacccttttatgcttttccatcggaagcggcatttccgcttttgtgacgagcttatcggcatttctaatccttcgtttcgtgattggtatgggacttggcggcgagcttccagttgcttcaacactcgtttcggaagcggttgtgcctgaaaagcgaggcagagtgattgtgcttttggaaagcttttgggccgtgggctggctcgcagcggccttgatttcttactttgtgataccaagctttggctggcaggctgccctgctgttaactgcgctgactgctttttatgcgctgtacctgcggacgagtctgcctgattcgccgaaatatgaatcgctttctgccaaaaagaggtcggtgtgggagaatgtaaaaagcgtctgggcaagacagtatatacggccgaccgtgatgctgtcgatcgtttggttctgtgtggtgttttcttattacggcatgttcctatggctcccgagtgtcatgctgctgaaaggcttcagcatgattcaaagctttgaatatgtcctgctgatgacgcttgctcagctacctggctatttctctgccgcatggctgattgaaaaagcgggccggaagtggatactcgtcgtttacttgattggcacagcaggaagcgcctatttcttcggaacggcggattccttaagtcttctgcttacggctggaatgctgttatcgtttttcaatctcggtgcatggggcgtgctgtatgcttataccccggagcaatacccgactgcgattcgagcaacaggttcaggaacgacagcagcgtttggaagaatcggcggcatcttcgggcctttgcttgtcggaacgctcgcagcccgtcatatttcgttttcggtcatcttttcaatcttttgcattgcaatcttactcgcggttgcttgtattttgattatggggaaagaaacgaaacaaactgagctagaataggaaaagcacctcttgaatgaggtgctttcgcgtgtcgacaaaccctcgcattcgttgtcaggactgcgcttcggtgctcaatgcgaagtggatcaacggctaaattctcaggcgtcctgcctaaacgccgtcgtcatcacatcctgtgaatgtccgctcctatgctcgtccttcctagacttcaagggttttcaatcacgctgaaaaaatgacaaaattctaaaatgaaaaccattttagaattttgtcaacaatctgaggtacctctgaatgaggtgcttttttacaattgcgcccgggctgcggattggcgtttcccggttttactaattgtctggtagagcgtcatagaaagtatgaacagaatggcagtaaatcctgtgacagctccgaaatgctgtgtgctttgatataaaaaacctgcaatacttgtaccgacagtggttccggcatacatagcggcattggaaagggaagcaatggttcctcgcgcatttggtgcaatggattgaaagacacccatcattaacggaaagatgatgccagctgtaaagaacgtgagaaaaaagccggcttctactaaaaacaagtttggaaagaacggaagagcgaaatagagagcgcccattagcagcatcccgctgatcagtgttttaaacatgcccagcttttctgaaacccggctgccgataaggctcccgagcatatttcccagtccgagtacaagcatagctgcgccaatttgtgacacggttaaatgataatccgcggaaagccaagtacccagaaagctgaacgatgcgaagtttccggtttgaaacagaaaataggcaagcagaatgaccgatgttttcggcaatgaaaaaagctcccgataggggttgacaattgatgggcgcgccaatggttcagaaggccggatgccaggcatgaccgccgccaggatcaatagaagaataagcgagcacgctgacaaaacgaaaaatggcgtatgccatgtaaaggaagcgagaaaccctccaataggaagtccgagcatttgtgaagcggccaaacctgctgtcgcaatccccatgccttttatgatctgagaaggctggacaatgactgggatggacgcccaaatttgaggcgtcacaaacgcagcgctaacgcctgcggcaaaacggaacaggcacatggcggcaaaagagggagcgatgccgcataaaaacgtggatacaataaagcctgcaagtccccacagcatgactgttttcctgttcagccggtctgagattgggcctgcaatgaaagcgaagagcgcataaccgagtgcataagcactgaccatccagcctgacaaatcagtagagacatgaaactgatcctgtaaaagggggagaagcggcgaaagcaaaaaggtatccgtgccaatgacaaacatgacactgaagaaaagccaaatgcgattcaaatttatcactcctattgttttataactttgaaactatgaaacagatatgtatagagaaaaccctttgttagagggtttccaaaaagccaggcaggtatgtttgaaatgtgtcttcacgcagactgacgtattttgtccgcgaatctttccgggttgccgtcaatcccgcttcacgcagcgttttaaaatgataagatgccgtggttttgacaatattgcacttttcacctacttcaccgcagctgagttcttttccgctgacataaagcgtacgaataatggcaagccttgattcatcagacagtgctttaaaaatttgcgctctgatttgatcatctgattgtttcatagtcatgaaactataatacataatgggtgttgaaaaagcaacttatttttccagtaaaggagcaggaagtcataagaggaaggaggaattcaattccaataaaagcgttttcaactaaagataggcgaaaaatcacccgtaaaatacaatcatataggaggattacagagcatttagaagcataaataagatcatgtggtcacatggatgtttataaagaaatggtacagaataaaagagaatatgctgtttgtgtaggaagttacataaatgttacggtaataaagattgcttaatatggagggaaaatatgagtgtagatgagaaaccaattaagataaaagtcgagaaagtctctaagatttttgggaaacaaacaaagaaggcagttcaaatgcttgccaacggaaagacaaaaaaagagatcctgaaagcaaccggatcaaccgttggggttaatcaggcagattttgaagtatatgatggtgagatatttgtcatcatgggtctatcagggagcggtaaatcaactttagtacggatgttaaaccggcttattgaaccgactgccggaagtatttacattgatggtgacatgataacaaatatgtcaaaagaccagctccgggaagtccgccggaagaaaatcagcatggtcttccaaaagttcgctctgttcccgcacagaacgatacttgaaaacacagaatacggactggagcttcaaggtgtagacaaacaagagcggcagcaaaaagcgcttgagtctcttaagctcgttggactggaaggatttgaacaccaatatcccgaccagctttccggcgggatgcagcagcgtgtcggccttgcccgcgcgttgacaaatgatccggacatccttctgatggacgaagcgttcagtgcgcttgatccactgattcgtaaagatatgcaggatgagcttcttgatcttcacgataatgtcggaaaaacaattatctttattacgcatgacttggacgaagcgttgcggatcggcgacagaattgtcctaatgaaggacggcaacatcgttcaaatcggcacgcctgaagaaatcctgatgaatccatctaacgaatatgttgagaaattcgtcgaagatgttgatttgtctaaagtcctcacagcaggccacattatgaaacgcgctgaaacagtgcggattgataaagggcctcgcgtagcattgacactgatgaaaaaccttggaatttcttcaatttatgcagtggataaacaaaagaaattattaggtgttatctatgcgtctgatgctaaaaaagcggctgagtctgatttgtcacttcaagacatcttgaatacagaatttacaactgtaccagagaatacgtatctgactgagatttttgacgttgtgtccgatgcgaatattccaattgcggttgtggatgagaagcaaagaatgaaaggaattgtcgtaagaggcgcgctgattggcgcacttgccggcaataacgagtatatcaatgctgaaggcactaacgaacaaacacaagatccttctgcacaggaggtgaaataagatggatagactgcctagaatacctttagcagatattattgaccgttttgttgactggattacgatgacgtttggcggattcttcgacggaatcgctaacggattggccgcttttgtaaatggaattgtcaccggtcttggatttattccatctattttgttaacgattattttcgccgcacttgcgtggtggatcagtacaaggggaattgcgttatttacgttgattggattcctcctgatcgattatttaggatattgggacccaatgctgcaaacattggcgcttgttttgacatctgtgattatttcgattgtggtcggggttccgatcggaatttgggcgtctcagaaagaaacggttcgccgtattgtaacgccaattcttgatttaatgcagacaatgcctgctttcgtatatctattgccggcgattttcttctttaacatcggtgttgtgccgggtgttgttgcatctgttatcttcgcgatgccgccgacaatccgcatgactgttctcggtattaaacaagtgccggcggatttgattgaagcgactgaggcattcggttctacaacagttcagcgtttgtttaaagttcagcttccgcttgcgacaaaaacgattttggccgggatcaaccagagcatcatgcttgcattatcaatggttgttatcgccgcaatggtcggtgcaccgggacttggttctgaagtatacagtgccgttacacagctgaaaaccggggtcggagtagaggccggtatcgccatcgttatcgttgccattaccctggaccgtattactcaaaatattaaagtgaagaagaaaagcagggggaatgcctgatgcttaaaaaaatcatcggcatcggcgtttccgccatgctggcgctctcacttgcggcttgcgattcagaaaacgatgaaaatgcatccgcagcagaacaggtgaataagaccatcatcgggattgaccccggttcagggattatgtccctgactgacaaagcgatgaaggattatgacctgaatgactggacattgatttcagcgtcaagtgctgcgatgaccgctacgcttaaaaagtcatacgaccgtaagaaaccgattatcattacaggatggactccgcactggatgttctccagatataagctgaaatatctcgatgatccgaaacaatcttatggcagcgcagaggaaatccatacgatcacacgcaaaggcttcagcaaagagcagccgaatgccgcaaagcttctgagccagtttaaatggacgcaagacgaaatgggcgaaatcatgatcaaggtggaagaaggcgagaaacctgccaaagttgctgctgagtacgtcaataaacacaaggatcagattgccgaatggacaaaaggcgttcaaaaggtgaagggagacaaaatcaaccttgcctatgtggcgtgggacagtgagattgcaagtacaaacgtcataggcaaagtcttagaagacttgggctatgaggtaacacttactcaggtagaggctgggccgatgtggactgcaattgcgacgggaagtgcggatgcatcactttccgcatggctgccgaatacccataaagcatacgccgctaaatataaaggcaaatatgacgatattggcaccagtatgactggtgtgaagatggggcttgttgttcctcaatatatgaaaaatgtcaactcaattgaagatttgaagaagtaatcaaaaaagcagcctgtgtcaggctgctttttttgcgttattttacgtaagcggcagcgggtgaatcagccttttgaaaagtttttaatacggcattcgctaaaatatgaatgccggtaaacatcgcgtttcggtcaaaggtcatgtgcggatgatggagccccggctggagcccgcagcctagtccgagcatcgttgttttcagattcggcaccttcacggcgtaaaaatggaaatcctctccgccggtagtgacaagcgggtcatcaagccgctcagccccgatgatatctgtaatggcttctgccatgatcgcttcagcttctttgttttgtgttgccgcaggaaggctgtgttctttttgcagctcgatttttgcgccgaatgcagcggcggccgcttcacaggctctttctgtctcggcgattaacgcctccatggcttcattggtctgtgcgcgcaaatcaaggctgaacgatgcttttcctggaatgatgttagagctttcaccgccggcttgaagttttgtcattttgacggtatgcgggatttgcgggtcaatatgaatgagtccgagcttatgtacaagaaatgccgcaatttcaatgctgttttttccgagatgcggacgggcgccatgagcctcttccccgatgatcgttccctcaatgtgctggcttgatccgtgcagaatagacggagcgcagcggccgttctgtgtttcctgaatcgggcggacgtgaacgccatacaaatagtcgatatcatcaagcacgccttcttctatcattttcaaggcgccgccgcctttttcttctgccggctgaaagataaaacggattgtgcccttcggaagctcaggttgtttttttagcagcattaatgtgcccaatgccattgtcatatgtgaatcgtgtccgcaggaatggttggcgcgaaatgtgccgttaacctcctgccacagcgcgtcaatatcagcgcgtaccgctacaacaggtgagcctgagccgatttcgccgacaaccccggtgcagtctgaaaacgtgcgcgtccggcaccctaaatcctcaagcttttgtttcaaaaatgaagttgtctcatattccttccagctgacttcagggttcgcgtgcagatgctcgaagatgtccataatggtttgtttcatgtcttctgaaagcttttgcatggtaagaaatacctccttctatcagaatgaatttttaccttctttactttatttatattgaaacaggaagataggctgtatataatatagcacatattgctactattcagaataattaatattttcaaacagaggggatggatcgaaatatgagtatgccagcagccgaaacacagcctaagaaaaaacgaatgacatttaaaatgcctgacgcttatgtcctcttatttatgattgctttcatttgcgcaatcgcttcatatattgtgccggcaggtgaatttgaccgcgtgacaaagggggatgtcacgaccgctgttccgggaagctatcattccattgaacagtctccggtcagcttgatcagcttttttacttctctacaggatggaatggttggatcagcacccatcatctttctgattctattcacaggcggcaccattgctattctagaaaaaacgggtgccatcaatggcctgatttacaatgtcatcagcaaattccgcacaaagcaattattatttatttgtattgtcggcgcattgttctccattctcggaacaaccgggattgtcgtgaattcagttatcggttttatccccatcggcctcattgtggcacgatccttaaaatgggacgcagtcgcgggagccgctgttatatacatcggctgctacgctggatttaactccaccatattatcaccgtcaccgctcggtttatcacaatcaatcgcggagctccctcttttctcaggaatcggcctgcgagttgtgatatacatatgctttttgctgtcttctattatttatatctatttgtatacgagaaaattaaaaaaatcaaaagatgccagtgtgttaggaacagattggttccctgcggcaggaatgggcgaagccggtaaagaagaagatcagtcagtgccgtttaccgttcgccataagctgattttggctgtggcgggactctcacttgtcggatttttatacggcgctttgaagcttggctggtcagattcccaaatggctgcgacatttatttttatttctgtccttgccggtttaataggcgggcttgcggcgaacgatattgccaaaaccttcattacgggctgccaaagtcttgtatacggggcgctgattgtcgggatggcacgaagcatttccgttatccttgaaaatggaaagcttctcgatactgtcgtcaatgctttggcttcacttttggatggattcagcccgattgccggggcaatcggcatgtatatcgccagtgcgctgcttcattttctcatctcttcaggttctggcgaagccgttgtatttattccaatactggcgccgctcgctgatttgatgggaatcacgagacaggttgcggtggaggcagttatgcttggagaaggggtcgtcaactgtgtgaacccgacatccggcgttctcatggcggtgcttgccgccagcggtattccgtatgtcaagtggctgcggtttatggtgccgcttgctctgatttggttcttgatcgggcttgtctttatcgtgatcggcgtcatgatcaattgggggccgttttaacgattgctgcccgccggcttgtacggcgggcttttgagttattcattgcagaagcgcaggctgttattgtaacatgtaagccataagccattcgtaaaagtgcgggaggaaggtcatgaataatctgcgtaatagactttcaggcgtgaatgggaaaaataagagagtaaaagaaaaagaacaaaaaatctggtcggagattgggatgatagcgggagcatttgcgctgcttgatgtgatcatccgcggcattatgtttgaatttccgtttaaagaatgggctgcaagccttgtgtttttgttcatcattatcttatattactgcatcagggctgcggcatctggaatgctcatgccgagaatagacaccaaagaagaactgcaaaaacgggtgaagcagcagcgaatagaatcaattgcggtcgcctttgcggtagtggtgcttacgatgtacgacagggggattccccatacattcttcgcttggctgaaaatgattcttctttttatcgtctgcggcggcgttctgtttctgcttcggtatgtgattgtgaagctggcttacagaagagcggtaaaagaagaaataaaaaagaaatcatcttgaaaaatagatggtttctttttttgtttggaaagcgagggaagcgttcacagtttcgggcagctttttttataggaacattgatttgtattcactctgccaagttgttttgatagagtgattgtgataatttaaaatgtaagcgttaacaaaattctccagtcttcacatcaggttgaaaggaggaagcggaagaatgaagtaagagggatttttgactccgaagtaagtcttcaaaaaatcaaataaggagtgtcaagaatgtttgcaaaacgattcaaaacctctttactgccgttattcgctggatttttattgctgtttcatttggttctggcaggaccggcggctgcgagtgcagaaacggcgaacaaatcgaatgagctaacagcaccgtcgatcaaaagcggaaccattcttcatgcatggaattggtcgttcaatacgttaaaacataatatgaaggatattcatgatgcaggatatacagccattcagacatctccgattaaccaagtaaaggaagggaaccaaggaaataaaagcatgtcgaactggtactggctctatcagccgacatcgtaccaaattggcaaccgttacttaggaactgaacaagaatttaaagaaatgtgtgcagccgctgaagaatatggcataaaggtcattgttgacgcggtcatcaatcataccaccagtgattatgccgcgatttccaatgaggttaagagtattccaaactggacacatggaaacacacaaattaaaaactggtctgatcgatgggatgtcacgcagaattcattgctcgggctgtatgactggaatacacaaaatacacaagtacagtcctatctgaaacggttcttagaaagggctttgaatgacggggcagacggttttcgatttgatgccgccaaacatatagagcttccggatgatgggagttacggcagtcaattttggccgaatatcacaaatacatctgcagagttccaatacggagaaatcctgcaggatagtgcctccagagatgctgcatatgcgaattatatggatgtgacagcgtctaactatgggcattccataaggtccgctttaaagaatcgcaatctgggcgtgtcgaatatctcccactatgcatctgatgtgtctgcggacaagctagtgacatgggtagagtcgcatgatacgtatgccaatgatgatgaagagtcgacatggatgagcgatgatgatatccgtttaggctgggcggtgatagcttctcgttcaggcagtacgcctcttttcttttccagacctgagggaggcggaaatggtgtgagattcccggggaaaagccaaataggtgatcgcgggagtgctttatttgaagatcaggctatcacagcggtcaatagatttcacaatgtgatggctggacagcctgaggagctctcgaatccaaatggaaacaaccagatatttatgaatcagcgcggctcacatggcgttgtgctggcaaatgcaggttcatcctctgtttctatcaatacgccaacaaaattgcctgatggcagatatgacaataaagctggggcaggttcatttcaagtgaatgatggtaaactgacaggcacgatcaatgccaggtctgtggctgtgctttatcctgatgatattgcaaaagcgcctcatgttttccttgagaattacaaaacaggtgtaacacattctttcaatgatcaactgacgattaccttgcgtgcagatgcgaatacaacaaaagccgtttatcaaatcaataatggaccagagacagcgtttaaggatggagatcaattcacaatcggaaaaggagatccatttggcaaaacatacaccatcatgttaaaaggaacgaacagtgatggtgtaacgaggaccgaggaatacagctttgttaaaagagatccagcttcggccaaaaccatcggctatcaaaatccgaatcattggagccaggtaaatgcttatatctataaacatgatgggggcggggcaattgaattgaccggatcttggcctggaaaaccaatgactaaaaatgcagacggaatttacacgctgacgctacctgcggatacggatacaaccaacgccaaagtgatttttaataatggcagcgcccaagtgcctggccagaatcagcctggctttgattacgtgcaaaatggtttatataatgacgcgggcttaagcggttctcttcctcattgagggcaatgctagaggggacttaccgaaagaaaccatcatagatggtttcttttttgttcataaatcagacaaaacttttctcttgcaaaagtttgtgaagtgttgcacaatataaatgtgaaatacttcacaaacaaaaagacatcaaagagaaacataccctggaaggatgattaatgatgaacaaacatgtaaataaagtagctttaatcggagcgggttttgttggaagcagttatgcatttgcgttaattaaccaagggatcacagatgagcttgtggtcattgatgtaaataaagaaaaagcaatgggcgatgtgatggatttaaaccacggaaaggcgtttgcgccacaaccggtcaaaacatcttacggaacatatgaagactgcaaggatgctgatattgtctgcatttgcgccggagcaaaccaaaaacctggtgagacacgccttgaattagtagaaaagaacttgaagattttcaaaggcatcgttagtgaagtcatggcgagcggatttgacggtattttcttaatcgcgacaaatccggttgatatcctgacttacgcaacatggaaattcagcggcctgccaaaagagcgggtgatcggaagcggcacaacactagattctgcgagattccgtttcatgctgagcgaatactttggcgcagcgcctcaaaacgtgcacgcgcatattatcggagagcacggcgacacagagcttcctgtttggagccacgcgaatgtcggcggtgtgccggtcagtgaactcgttgagaaaaacgatgcgtacaaacaagaggagctggaccaaattgtagatgatgtgaaaaacgcagcttaccatatcattgagaaaaaaggcgcgacttattatggggttgcgatgagtcttgctcgcattacaaaagccattcttcataatgaaaacagcatattaactgtcagcacatatttggacgggcaatacggtgcagatgacgtgtacatcggtgtgccggctgtcgtgaaccgcggagggatcgcaggtatcactgagctgaacttaaatgagaaagaaaaagaacagttccttcacagcgccggcgtccttaaaaacattttaaaacctcattttgcagaacaaaaagtcaactaaccgcaactttagagtaaagggctgattgtcaatgtgggagcagttgtatgatccgtttggaaacgagtatgtgagcgcacttgtggcgctcactccgattctcttttttcttttggctttaactgttttgaaaatgaaaggcattcttgcggcatttcttaccctagccgtcagtttcttcgtctccgttttggcatttcatatgccggttgaaaaagcgatttcttctgttttgttaggaatcgggagtgggctgtggcctattggctacatcgtcctgatggcggtgtggctgtataaaatcgcagtgaaaaccgggaaatttaccattattcggtccagcattgccggcatttcgcctgaccaacgattacagctattattaattggtttttgttttaacgcgtttttagaaggcgcggccggttttggtgttccgattgcgattagtgcggcgctgctcgtcgaacttggttttaaaccgttaaaagcggcagcgctctgcttgattgcaaacgcagcctccggagcctttggggcgatcggaattcctgtcatcacaggggcgcagattggtgatttgtctgctcttgagctgtcacggacattaatgtggacactgccgatgatctcatttttaataccattcctgcttgtattcttattagaccgaatgaaaggaatcaaacagacatggcccgctcttctggttgtgagcggtgggtatacagcggttcagacactgacaatggcggtgctcgggccggaattagcaaacattttggctgccttattcagcatgggcgggcttgccctcttcctccgcaaatggcagccgaaagagatttaccgcgaggaaggggccggcgatgctggtgagaaaaaggcataccgtgccgctgacattgcgaaagcgtggtctcctttctacattttaactgcggcgatcaccatctggagccttcctgccttcaaagcgcttttccaagaaggcgggctgttatatcaatcaacgctcctgttcaaaatgccttttctgcatcagcaaattatgaaaatgccgccgattgcgccatctgccatgccgttagatgcagtctttaaagttgatctgctgtcagcgactggtacagcgattttagcggcggtcatcgtgacagggctgttcagcaaaaagttctcctcccgggatgcctttgcttccctgaaggagacaggaaaagagctgtgggtgccgattatgacgatctgcttcgtgatggggtttgccaatctggccaacttcgcagggctcagctcttcaattggattagcattggcgaaaacaggagacctgttcccgtttgtcagtcctgttcttggctggattggcgtgttcattactggttctgttgtcagcaataatgctttgttcggtcatttgcaggttgtcaccggagcgcagatcggtgcgggttcagacttgctgttagccgcaaatacggcgggcggtgtcatggcgaaacttgtttctcctcaatctatcgccatcgctgccgcagcggtcggccaaacaggcaaggaatctaaactgtttaaaaagacagtggcgtacagcctgattctgttagtgattatttgtatatggacgtttattcttgcaagatttggagtgtaatagaaaagagcagtacatgcccagcatgtactgcttttttatgttaatttgctttctttgtcatttcggctgttgttttcactctggctttccccataaataaaatggtaaccgccgcgaggacaattggaatcaaagcgagcaaaaacacatacgtaatacttgatgacatcgcgtcaataatgcgattcaggatcgcatcaggaatctgggaacgtgttccagcttggaatatctcctgcgggtcgccaatattttgcgcagcacctgatcccgctgagcctttcatcccgctgaaggcgtcggtcagcttgttcgtgaatacgtttgtttgcaccgttccgaaaatggtgacgcctaaggtcatgccaaatgatcgcaaaaatgaatttgtagagtttgccgttccccgaaagcgaggttcaagatcattcatcgatgccgccggcagcagggagaagttaaagcctacaccaaagcctgaaatcatcataaagactgtcagccatacccgtgctgtgtcaggcgtcatattggaaagaagcagcatgccgataaagaaagctataacagatatcagcatcaaattgcggaagcttgccttcgtttggaagatcccgccgatcatgcttccgatgactgatccaatcatcatcggcgtcagaatgaagcccgcgcttgtcgccgagctgccgtagaccgcctgaacgaaaatcggaataaataccgctaaaataataaatgttccgccatacaggaaagcgagaatctgtgctgtggcaaacaagcggttcttaaacatccagaaagaaataatcggctcttctgcttttctctccacaataaaaaaggcaatgaagaaaacggcgaatacaataaacagcccgatgatctgaatggaattccaatcgtatgttttgccgccaagctcaagggcgaacatcaggcatacaatggatacgactaaggtaatcgcgccgccccagtctattttctgctttctgtgctccagagattctttgtagtagcgaataatgaaaaacaatgacaatgcgccgatcggcacattgatgtaaaacacccagtgccagctgatcgaatctgtaatgatcgcgcctaagagcggaccaagaacactggataatccaaatacagcaccgaacatgccggacatttttccgcgtttttccggcggaaacaaatcaaagataatggtaaaggcaatcggcaggagcgcgccgcctccgatcccttgaatggcccggaagatgatcagctgattcatcgtctgggcaatcccgcataaagcagaaccgattaagaaaaaaataagtccaaacaggaaaaaacgttttcggccgtacatatcggaaagcttgccgtaaatcggcatgccagccataaccgccaccatataggatgccgtcacccatgcaaatttatcgaaacttccaagatcggctacgatattgcccatcgcggtggcaacaatcgtattgtccattgcagacatcaagatgcccagcaggagaccgaggaccacaaatttggtggaagcctgttttgctgttgttgtgtccatttgttctacctcctcttacttttctatgtaagttctgatatcatgataatagtttgattgttgaatatctcgattatcaagataaactcgattttatagggaggactgtcagttgtcaacaagaaattccagaagtgagttggaaaagactgctgttcagctttttcgaaaactgggcacaagaacggttctgtttcatcaggcagccgctcaagctctcggtctgtttcccaccgatttgaaatcagctgacattttaaatgaagcagggccgatgacggccggagaactgggaaaaaaaaccggcctcagcacggggtcagtcacggcgcttgttgaccggctggaaaaagcggggtatgtggctcgtgaaaaggacccgaatgatcgcaggagagtcgtaatcgtccctttgactgcttcgaaaaaacatataaaggatttgttccgtcctctgtctgagtcaacgatggatttgtgccgcgaatatacggaagaggagctggaactcattttcagttttgtaggcaaagccgccgatattatggaggaagagcttgaacgtctgaaacagtaagtgaatttgtgcatagcttggcccgttcccgaataaattgtacaagttacataagagaagggagtacgggccggtgaacatttttttgagctatattgtgctgggactgtccttgtctgcgcctgtggggccagtgaatgcggcgcaaatagacaaaggaattaaaaacggtttttggcatgcatggattttcggtttaggcgccatgacagcggatgggctgtacatgctttttatctatttcgggctgtcacagtttttgaccgctccatttgtgaaaacgtttttgtggctcttcggcttttttgtcctgacctataccggaattgaaacgcttaaaaacgtcagagaaccgatggatgtgcgaagctcgcgggggaaaccgtcatacaggaaaacattcgcatcgggttttctcatttcattgtcaaacccattgagcatccttttttggcttggaatttacggaagcattcttgcgaaaacagcagaggcctacaatatgaatcagcttctaatctatagctccggcatcatgatcggcattttaatctgggatttctgcatggctatcacagccagtacgttcagaaacctgcttcatgaaaagctattgagaggattgaccggaatcgccggtgtatccctccttgtgtttggcttttactttggttatcagggcatcaaacagttattgggctgattcatgaaggacagtcacctgccgcttccagttttaatatagtatccagatgatactggaggtggatcaatggtgaatgggatttacaccaaaagttttctggaacgtattcaggaagagcttcctgaatggcaaagaatcgcttttgagctgctggcagaaactctgggggacgacgcggatacgtttccgtgcattcccggacgccaggcgtttctgactgatcagcttcggattgcttttgccggagatccgcgggaaaaccgcacagcggaggaactggctccgttgcttgcggagtacggcaagatatcgcgggacacgggaaaatacgcatccctcgttgtgttgtttgatacaccggaagatttggcggagcattattcgattgaagcgtatgaagagctgttttggcgctttttaaatagactgagtcatcaagacgaaaaagaatggccggaagacattccggccgatcccgagcattataaatgggagttttgttttgacggcgagccgtactttcttctctgcgctacaccggcgcacgaggcgagaaaaagccgaagctttcctttttttatgatcacgtttcagccaaggtgggtgtttgaggacctaaatggatcaactgcatttggccgtaacatgagcaggctgatccgatctcgtttagaggcctatgatcaggctccgattcacccgcaattaggctggtacggaggaaaagataatcgtgaatggaagcagtatttcctccgtgatgacgaaaaacaggtatcgaagtgcccgttttcttatttaaagaacatgttcaacaaaatgaaataaatcaaggactggcagggcgatctttatgaccctgctttttttgatagatcatggtaacgatggcgatgatcacgagaaaacctatgctgacgaaaaaaccgggccggcttgatttttcaaacaatgtaccggacacagccgcagcaatcagaaccatcgctaaataaatttgcgtttttcccatgccctcgggatcagtcagctttttgctggagaacaggataaacagccaagtgtataaaagcataagccccgcagctgttgtcatatgctcataaatgtttttaggcagcactaacgacagaataatggagagaacaagccccgcaaacgtcagcccaagtgccggccagcatatttttttgccttcctttagagtaaagcatttcggcgcgtcgccgtcatcagccatcgtacaaagcaatgtcgtaaccgcaaatagcgaagcgacaagggtcgagaacccggcgataatgaaaatcccgttaaatatatcaaggatgatctcaaggttgtatccttttaacgacgtaatgaacgggctgtcctgttctgtaaacttgtgtaacggaaccaaaagcagagccagcccgattgaaatgatataaataatcgccagcgttgccagcatcagtttccctgatttagacgcttcctcaggtttttttaagtgaaccgccatcagccccatgacctcaatcccgccaaaagcgtaaaacgcgtagattaaacctgtccacagccccatggcgccgtatgggaaaaactcactcgtcttatttggaacatgtatgccatgatttccgccggacaggataccgcataaagccaggatggcaatgacaataaacataaaaatagcagctgttttaatgactgccagcacgttttctgttttttcaaagacggacaggccggtgaaaataataaggagccccagtactgcatagattgaggcaaacacccatagcggcacttgaggaaaccaatgcttcgtaaatagcgaaatggctgtcagctggcttccggtaatcagcatttctgatgtccagtacacccagccgttgctgaagcctgcccatttgccgaatgcttttcgggcatacgcacaaaacgagcctttttccggctgcttcgccgatagcttggcgagctgttcaaagacaaaatacgtaccgatccctgcgatcagaaatgaaaggagaacggaaaaaccgctttttacaattgcgatgctggaaccgagaaagaagcctgttccaatcgtgcagccgactccgatcagtgacagctgccaccaagccagattcccttttggctggtctttttttgtttggctcattatttattcaaccccttttatctaaggttagattgtgatctgtccaaagcttatatacatcggatttttgcctctttttacatggagaaggaagcggacgctcatactaatgaaaaaaggagcaaaccaatgacacagcaatatattgtggagccgaaaaaagggcttgggctgaagctgaaaaagggtcagattttaaaggtggttgatgtagaagggcagcaggtggctgattttgtcgcataccatgccaaggatttttatgaacaccttgatcagggagcgacgatagacgccaatcactccattcatgtgaaggtcaacgaccatctctactccaacctgtataagccgatgttaaccctgattgaagatacggtcggcaagcatgatctgctgttgcccgcctgccgtcctgatatgaacaggctcttatatgggaagcaaaaggatgagtttcaggatacgtgctatgacaatatgaaccgtgcgcttgagcagtttggcgtaccgaagcctcacatgcattacccatttgcgatttttatgaatactgtccttgatgagaaagggaatctgtctgtggaaacgccgctttcgaatgccggagattatgtaaggctcagggcggagatggatttaattgtcgcgttttcttcctgcccgattgaaaaagggaaatgcaatggcgacagtgtgacatccatacgggttgaagtcagctgatctctcttgttcactgtgaatgaagacctgtgctatatttaatagggatacataacagtcatgattcattttcattgatttggggaaatgatcagtaacaagggaaaatgtacaggaggaatgattgggatgagcatgcaggaaaagattatgcgtgagttacatgtgaagccctcaattgatccaaagcaagaaattgaggaccgagtcaattttttaaaacaatatgtaaagaaaaccggtgctaaaggctttgtattgggaatcagcggcggccaggattcaacacttgcgggaagactcgctcagcttgcggtggagagcattcgcgaggagggcggagacgctcaatttatcgctgtccgtcttccgcatggcacacagcaggatgaagacgatgcccagcttgctttgaagtttattaagccggataaatcatggaagtttgatattaaatcgacagtcagcgctttttctgatcagtatcagcaggaaacaggcgatcagctgactgactttaataaaggaaacgtaaaagcaagaacaagaatgatcgcgcaatacgcgatcggcggccaggaaggccttcttgtgttaggaacagaccatgctgctgaagcagtgactggtttctttacgaagtacggtgacggcggagcagacctcctgccgctgacaggcttgacgaagcgccagggaagaaccttgctgaaagagctgggtgcaccggaacgcttatacttaaaagaaccgactgccgatctgctcgacgaaaaaccgcagcagtcggatgaaacagagcttggcatttcctacgacgagattgacgattatctcgaaggaaaagaagtatcagcgaaagtatcagaagcgctggaaaaacgctacagcatgactgaacataaacgccaggttccggcgtctatgtttgatgactggtggaaataagttgaagaaagcccgctctcggagcgggcttttgtcgtgtacagaagctttatttgatgcggatatgattcagcttgaccattaatctgtcggcgaaccttcggaggctgcctctcgtatcaggatctaatgggagttcggctctcgcggcaatgttctctgccacatcctgaatcgacaggttgtctgtttgaatgtggtcctcaaaaatgggtgatgataaaccttcaatgcagcggtcaatttgtttggcggcccaggagttttttccttctgctctggtgcgcagcctttttaacaaggtttcctttgaagccattagtgtaaagtggtgaacgatcctgccttcatgcctgagcctgccgatgatctcattgaagtattcaggatgtacaatcgtcataggcacaataatgatgccgcggtatgtatctgtcagagaagctagaaaactgtaattgaacgcccgccataagggatagctttgaaaatcgtcctttgcgatctcctgcggcaccatggagcgcagcgcaaaacccattttctcgggatcatacacgtaagatgggtttagccttctgtgcagttcgaaggctgtttgtgtttttccggaaccgaatgccccgtttatccaaatgatcatcgccatttctcccttcctattcatcatacagaaaaagacccttcaatcgaagagtcagctggaaaaacaataaaggcggaaggttttaacgcttttttgcgtcgaagtattaaaatacctgcagaaatgttgtacaatgaatgtcattcaggcaaaaatggctaaacaacaaagcgcactttaagcttggaccggtaaagccggtatctatataaatattcgttaaataagcatataatgaagataaaatttcattccttaggaggatttcgccgaagatgaacgctaaacgagccatcccagtaagagaaagaaatatcgtcctgatcggattcatgggtgtaggaaaaacaacaatcggccaattggtcgctaaaaaattatatagagattttattgatattgaccaagagatcgaaaaggatttcaatatgacaattcctgagatatttgagaaaaagggagaagactttttccggaaaacggagaaggaatatattttagacatctgccatcataaacgattcaaagtcgtatctctgggcgggggatcttttaaacaagaagaaatcaggaattgctgtctggaaaactgtctcgtgcttcatctggacctgtcatgggagaactggaagcagcgcgcggatttattgatcgaaagccgccctgtactgcataaccgttcaatggatgaaatggaacagctgtttaacgaaagaaaagtcatttatgacaagcacaattcaaaagtggcaacagacaacctttccccggaagaggttgccgattacattgttgagacattaaaaattggctgggatctttatcagccgatgtaaaaagccgtgcgcagcgcacggctttttttatcgttttatcccttgtatcaaaatcgcttttaaacaaaaggagatgggctgtccgttttggttcaatgtaatacagaacgtgtcgcgtgcttcgtctgatgcgtgattcaagtgggtaatgatttgtttttctcggtcagcgggggttccgcctcgtttgatccagctatcgtattgaatcggcaagttccacttttggatgtcttgataggccagttgattggcgctgaacatcgactgccattctgataatgagctttctcgaacatgggaagggtctcgaagccggttcaaatgattgacaaactcatcaagaatgggatcttcaggcgcgtaatgatcaactaagagaaaacgtccgtcctcttttagtacgcgtgcaacctcgctgacagctttgcggacatctgaaaaatggtgggctgcgtatcggcaggtgatgatgtcaaatgaatcgtcggggaaggggagtgactctgccgttccttgctgaaagcgtacgttttcagctcctttttcttgcgcgaaggaggacgcaacctcaaccatctctttcgtcgcatcaacaccgatgcactcctgtacataaggagaaaatgccagggccgtatggccggcgcccgctccgatatccagcacccgatgctctgcccggcattccgctgttttgatcatcaaccccaaatcttccccctcggcaaataccttttcatcccgatacatctcggcgtttttagaaaacggtgtttcattagtcatttgaaccagctccttcttttcgtaaatgatgatatggattatgttagcaatttctgttatgattcgtccaagatataaaaatgatgaaaacgataggttcaacctatggaggctgaaatggatattaaagtgatggaatatgcagcggaaattgcccagcgccaaagctttacaaaggcggcggaacatcttcatatcgcacagccgtctctcagccagcaaatcaaaaagcttgaggctgagctagggcttaccctttttcacagatcccatggctctgttacattgacaccccacggcaggcgtttcattgaaaaagccgaggacatcattcgttccagagatgatttgcttcgggaaatgcaggagcgatcacagggaatcggtcataaattatccatcgggattcctgctgtaacagggagatatctctttcctccgctgctgaagcagtttttggcgcgctatcctcatgtggaggttcagcttgttgaaaaagattcggtttcattagaggagatgacggcaaagggagaagttgacctttctgttttatccttgcccatcgaggatgaacggctctccattatacccttgctcacggaaccagttgttctcgcagtgccgaaggaaaaacaaaggtggatgccgccggaaatggtcgcgctgattgagaaagcgctggaagaagatgagggacaccagccgtgtgtgccgcttgacatggtaaggaacgtgccatttattctgttaaaagaaggcttcggctttcgcaggacagttctcgatctctgtgcggaaagcggctttaagccgaatgctgcctttaagacaagccatattgaaaccgcccaatctcttgtggctaacggattaggtgtgacaatggcaccgaatatggtcagaagggataaagatccgggtgtgatctatttattgattcaatccgcgccatcacgaaccctcgtcttcgtctttttaaagaaccgctatgtcagtctgaccgcccaggcctttatggaactaacccgggaaagtcttaaacaaacgtttgatgaaggctgtctgggaaacaaagatgaaaatatttagaaaacaaagccgaaacgtggtagtataggaatacaaactaaatcttataaaacaaaggggaataatcggaaatgcaactattcgatctgccgctcgaccaattgcaaacatataagcctgaaaaaacagcaccgaaagatttttctgagttttggaaattgtctttggaggaacttgcaaaagtcaaagcagaacctgatttacagccggttgactatcctgctgacggagtaaaagtgtaccgtctcacatataaaagcttcgaaaacgcccgcattaccggatggtacgcggtgcctgacaaggaaggcccgcatccggcgatcgtgaaatatcatggctacaatgcaagctatgatggtgagattcatgaaatggtaaactgggcactccatggctacgccgcattcggcatgcttgtccgcggccagcagagcagcgaggatacgagtatttcaccgcacggtcacgctttgggctggatgacgaaaggaattcttgataaagatacatactattaccgcggtgtttatttggacgccgtccgcgcgcttgaggttatcagcagcttcgacgaggttgacgaaacaaggatcggtgtgacaggaggaagccaaggcggaggtttaaccattgccgcagcggcgctgtcagacattccaaaagccgcggttgccgattatccttatttaagcaacttcgaacgggccattgatgtggcgcttgaacagccgtatcttgaaatcaattccttcttcagaagaaatggcagtccggaaacagaagtgcaggcgatgaagacacttgcatatttcgatattatgaatctcgctgaccgagtgaaggtgcctgtcctgatgtcaatcggcctgattgacaaggtcacgccgccgtccaccgtgtttgccgcctacaatcatttggaaacagagaaagagctgaaggtgtaccgctacttcggacatgagtatatccctgcttttcaaacggaaaaacttgctttctttaagcagcatcttaaaggctgataaatgtgaaaagccgccgcatatcatcaggcggtttttttctgcaaactgccggaatgagaacagactggagacgaatagatatgaaacaaagaatcattgatgaattaaaacggatcgagcagtcatacggagtcaaaatcgtgtatgccgtcgagtcaggaagccgcgcatggggatttccctcgcaggatagtgattacgacgtccgctttatttatgtgccgaaaaaggagtggtatttttcaattgagcaggagcgtgatgtcattgaggaaccgattcacgatttgctggatatcagcggctgggagctgagaaaaacgcttcggcttttcaaaaagtcaaaccctccgctcctcgaatggctgtcctcagacattgtgtattacgaagcatttacgaccgcagagcagttaagaaaactgcgcacggaggcatttaagcctgaagcaagcgtgtatcactatatcaatatggcgagaaggaacgtcaaggattatctacaaggacaagaggtcaaaattaaaaagtacttctacgttcttcggcctattttggcctgccaatggattgaaaagcacggaaccataccgccaatggactttactgttttgatgaatgaacttgttgctgaacccgagctgaaggctgaaatggaaaccttgcttgaacggaaaagaagaggagaagagcttgacctcgaagcaagaatcaatgttattcaccaattcattgaaacggaaatcgaaagaatcatggaagcggcaaaagaactgaaggcagagaaaaaagatatgacacctgagttgaaccgtttgcttttgaatacggttgaagaagtgtggaaggatggaggaagctgatgttttttgtcgcttccttttctcctttattcgacagaatcccccccgactttctaactatctgattgtgacaaacccacaaaaataatcagaatctttgtattttgagaatattgtgaacgtcggttttgtccatttacaataaactcatacaaatacttcttagattgcggggtgttgaggttggaagtgatcacaagagattttttcttatttttatccaaaagcggctttctcaataaaatggcgaggaactggggaagccgggtagcagcgggtaaaattatcggcgggaatgactttaacagttcaatcccgactattcgacagcttaacagccaaggcttgtcagttactgtcgatcatttaggcgagtttgtgaacagcgccgaggtcgcacgggagcgtacggaagagtgcattcaaaccattgcgaccatcgcggatcaggagctgaactcacacgtttctttaaaaatgacgtctttaggtttggatatagatatggatttggtgtatgaaaatatgacaaaaatccttcagacggccgagaaacataaaatcatggtcaccattgacatggaggacgaagtcagatgccagaaaacgcttgatattttcaaagatttcagaaagaaatacgagcatgtgagcacagtgctgcaagcctatctgtaccggacggaaaaagacattgacgatttggattctttaaacccgttccttcgccttgtaaaaggagcttataaagaatcagaaaaagtagctttcccggagaaaagcgatgtcgatgaaaattacaaaaaaatcatccgaaagcagctcttaaacggtcactatacagcgattgccacacatgacgacaaaatgatcgactttacaaagcagcttgccaaggaacatggcattgccaatgacaagtttgaatttcagatgctgtacggcatgcggtcgcaaacccagctcagcctcgtaaaagaaggttataacatgagagtctacctgccatacggcgaggattggtacggctactttatgagacgccttgcagaacgtccgtcaaacattgcatttgctttcaaaggaatgacaaagaagtaaaaaaggagagattatcatgacaacaccttacaaacacgagccattcacaaatttccaagatcaaaacaacgtggaagcgtttaaaaaagcgcttgcgacagtaagcgaatatttaggaaaagactatccgcttgtcattaacggcgagagagtggaaacggaagcgaaaatcgtttcaatcaacccggctgataaagaagaagtcgtcggccgagtgtcaaaagcttctcaagagcacgctgagcaagcgattcaagcggctgcaaaagcatttgaagagtggagatacacgtctcctgaagagagagcggctgtcctgttccgcgctgctgccaaagtccgcagaagaaaacatgaattctcagctttgcttgtgaaagaagcaggaaagccttggaacgaggcggatgccgatacggctgaagcgattgacttcatggagtattatgcacgacaaatgatcgaactggcaaaaggcaaaccggtcaacagccgtgaaggcgagaaaaaccaatatgtatacacgccgactggagtgacagtcgttatcccgccttggaacttcttgtttgcgatcatggcaggcacaacagtggcgccgatcgttactggaaacacagtggttctgaaacctgcgagtgctacacctgttattgcagcaaaatttgttgaggtgcttgaagagtccggattgccaaaaggcgtagtcaactttgttccgggaagcggagcggaagtaggcgactatcttgttgaccatccgaaaacaagccttatcacatttacgggatcaagagaagttggtacgagaattttcgaacgcgcggcgaaggttcagccgggccagcagcatttaaagcgtgtcatcgctgaaatgggcggtaaagatacggttgttgttgatgaggatgcggacattgaattagcggctcaatcgatctttacttcagcattcggctttgcgggacaaaaatgctctgcaggttcacgtgcagttgttcatgaaaaagtgtatgatcaagtattaaagcgtgtcattgaaattacggaatcaaaagtaacagctaaacctgacagtgcagatgtttatatgggacctgtcattgaccaaggttcttatgataaaattatgagctatattgagatcggaaaacaggaagggcgtttagtaagtggcggtactggtgatgattcgaaaggatacttcatcaaaccgacgatcttcgctgaccttgatccgaaagcaagactcatgcaggaagaaattttcggacctgtcgttgcattttgtaaagtgtcagactttgatgaagctttagaagtggcaaacaatactgaatatggtttgacaggcgcagtaatcacaaacaaccgcaagcacatcgagcgtgcgaaacaggaattccatgtcggaaacctatacttcaaccgcaactgtacaggtgctatcgtcggctaccatccgtttggcggcttcaaaatgtcgggaacggattcaaaagcaggcgggccggattacttggctctgcatatgcaagcaaaaacaatcagtgaaatgttctaagcgggactaaatgggcatcctccctgcgggggtgtccatttcatccatatactataaaaaagaggaggaagtgccatagaaaacacacagctgattatttcgatttgtatttatatggcgggaatgctgctaatcggctactttgcttacaagcgtacgtcgaatctgacggattatatgctgggaggacgctctttgggtccggcagtaaccgctctcagtgccggcgctgccgatatgagcggctggctgctaatggggcttccgggcgccatgttttctactggtctgagcggcgcttggatcgtcatcggactttgccttggagcgtgggcgaactggctttacgtcgcaccgcggctgagaacctatactgaaaaagcggggaattctattacaattcccggattcctggaaaatcgcttcggagatcaaacaaagcttctcagactgttttcgggaattgtcattttagtctttttcacgttttatgtatcgtccggaatggtgtccggcggcgttttattcaacagcatcttggggatggattatcacactggcctgtggattgtgacgggtgttgttgtggcatataccctgtttggcggctttttggcagtcagctggacagattttgttcaggggatcattatgtttgccgcactcattcttgtgccgatcgttacgtttttccacacgggaggagcaggtgatacagttgctgaaatccgctctgtagatcctgatatgtttaatattttcaaaggaacgagcgtccttggcattatttctttgtttgcctgggggctgggatactttggccagccgcatattattgtgcgttttatggcgataacgtccgtaaaagagatcaaaagagcgcgcagaattgggatgggctggatgattttgtctgcagtaggcgcagtgctgaccggtttgggcggaatcgcttattaccatcagcgcggcatgacactgaaggacccagagacgatttttattcaattagggaatatcttgttccatccgattatcacgggttttctgatttcagcgattttggccgcgattatgagtacaatttcttcccagctgcttgtgacatcaagctctctggtagaagatttgtataagtcgatgttcagacgctcagcttcagataaagaactggtgtttttaggccgactggctgttctggctgtttcaattgtcgcgttggttctggcttgggagaaaaataacaccatccttggattggtcagctacgcgtgggcgggcttcggtgcatcattcgggccggttgtactgctcagtctgttttggaaacgaatgaccaaatggggggcactcgccggcatgattgtgggagcagcgactgtaatcatttgggcgaatgccggtctttcggactttctgtatgaaatgatacctggttttgctgcgagtctattatccgtcttttttgtcagcatattgacgcaggctccgtcacaagctgtcacagaccagttcaacgactaccaagatacaatgtcacaataaagatcgaaaggaggaggaaggggctgtccctttttcctcttttctccttttaagcggccatttttttcttttggaaacaaacgtatttttttctatacaaaaagaccccgtatggatatgattaaagtaaaaaaagtataggagaaaaaggtatggaagagcttttagagagagttttttcattttcagatgttgataagctgattgattttattagctatgaactgcaaaagccagtgatactggaaagcgcggatttctttttgttagcctataattcttactatattaaccattttgattctgccaaccagcagactattttttcgaaaaagtgtccggtccagatttttgagaggtttctgaaggacggaattattgaaaaattgaaaacagagcctgagccttttcgcgtcaataaaattgaaagcattgggttaaaccagagggtggtcgtgagtgcaaagcacaaaggggaagtcatgggctacatctggattcaggagctggaccaaaatctgacggatgaagagctcgactttttgtacgagacctccttccatgtcgggaaaatcatttataaaacgaataaattgaaacaggaaaaggaagaaaaagcagaggatctcatcaaacgggcgatctatcagcaatttacctctgagaaggaactcagacgggaagctgaaaggatcaacaccgtgctgccttccatgttttcagttgttatcctgcacgccgcaaatggggatggggaagcggttgaggatttaaaggaaaatatcaggtcgtacctgaatttacgggataaggtcagtcatgtcttaacgatcgaatcaaacattgtcatcgtcgtagcgagtttttcccaaaaaagctccgtctcctcagcagcttctgagtttattaacaagctgttaacacattttcactttcaaaaaatacctacccctatttatatcggtatcggaaacgaatataatcacctattaaaacttggcaagagctacacagaagcacttgaagtcatcaaagccgcagaaatcaccggcaatcaggaaaacattccatatgaatatgccaaactcggcatttaccgctatttagaaagcatcgaacagaaaaatgaatttttagaatacgagaataaagatttagctttattaaaagcaaaagacgaagaaagcagcactgagctgctcaaaaccttggaaatctatctcctcaacaactgcaaaacaaaaccagcggcagaacagctgtttattcaccaaaatacattgaattaccgcatcaaacagattactgagatgacgtcgatcgatttaagcgatttcagaacgcggtgccagctctatctcgatttgatgctgatgaaaaagaaataaaaaagaaaccagtacttgtactggtttcgtcttcacttaaaatcctctgtaaacatacggatcatcaggttttttaatggtattccagtcagttactttgacgacagggagagttgacttgaatggctggtaatactctgaggccagagtgcccttaatgtgaatccattcatcatccttgatgtccatgtccttcggaaattccacaagcatcccgtacacgccggaatcagcgatacagtgaatgatgccaaaccttaatacgaacagctgatttttgttaattgcgtttcctttgtaagcaaatccatggaattctatcgtccgtccgagaaattcacccggatagttatagatggtttccattccttttaggaaatcgtcatcggtcagagaaatctcttttttgctggaatacttattaaacagctgtttcatttgtttgtcatagctgtcttgcgcgtaataaaggctggcatcaggccgcaaatactgtgtttgggagtaatgatctccgctctccatcgccttaaacgagaacccttttgttttgacaatggatgagtcaagcgttgcaatcgggaagaagatgcctgacaccaaaggaaaaagaaaaacaacataaatcaaataacgctgataaaatggcttgttttgttcatggtcatgctcgtgatcatggccgcacccgcaatcatggtgacccccgcttttttcaggcgacttgataaatagatatgcttggacggcggtcagaatagccagcaggaaaatcgcaataaaggatagataggaatatttcatattgatatattttgttagatttcctgaggcatgcagatgataaaagaaaaacgtaaatcccatcagcaccaataaacgaaacatccaatcacccctttaccagtagtgatcccgctaaaacaatcacgacaatatatgtaatcagcaggaaaacaaatcgttttttgaaggctgcaagcatcatcaatagattcttaatatccaccattgcgccaaagacgagaaaggcgattaacgatcctaatgaaaatgtgctgctgaaggaagacgcgatgaacgcatcaacttctgaacaaagcgacaggacaaacgccagacccatcatcacgagggaagaggatacatcattctgcccgatcgcaagcagagtggatgttttgacatacgtctgcatagcggctgcgataaaggcgccgatgattaaatatttccccacggagaaaaattcatcaatggcatgccgcaaggtcccgcccagtttttggagcaaggtgccgtgatgatggtggtggtgcccgggttcatcaggctttaaaagctggttatctttaaattgataggataaaatgaccccgatgatcagcgaaacggcgagagccagtccgcctctgtaaaagaccacgctccatctattcccgaacgcaatataagtagaaaataaaacgataggattaatgataggcgcggtcagcatgaaagcaacgcccgcatgcagaggaactccctttaacagaagccgcctcgtaatcgggatgatgccgcattcgcaggcgggaaataaaacgccggccagcgcaccgaataaaacggcgagaaaacggtttttcggcatgattcttgcaatcatttcttcagaaacaaacatttgaatgattccggaaagtatgacgccaatcagaataaacggaatggcttctattaaaatgctgataaaaatagaattcagctgaagaaaagatgattgtgctgtcacaataaaacctccgctcatgttaagctgcctttcttatgataccagaaaaaaaggcactgcttgtttgacggaggaagggaaaggatcgtttcactttggttaggattccaaaaaaccgagtaggatactgtctgtttctgcagcttcttttccgagccaaatcaggtgtccccatgagtgaagcaaacagagaacagcgccacgaatgtgctcttttgcatgatgtgcatgtgacaagtcaaccaatccatcataaacactttgcataatcagcacgggacatatgatggcttgcaggtcttttaaagagacagcggcggtttgtgacaagtcaatcagaaatccttcacccgagcgctgccggctgttcattttccgaaatgcttctatgtctttttcattcatcaaggacttgattcgctgaaacggaagcgtgctgaattgggggctcatagctcgaaacatcaaacgcgggaaagcgttattcaaggaagaaatcagcttccatatccacttttctaccggcgggcggaagagaattttccccaatttatattcagtgtcttttggggtgagccactctttggtgactgcggattgcagggtcaatgtatttactcttttcggataatgtgaggcaaagcatatgccgctcggccctcctgctgagatggcgatcacatggacactctcgatttgtagatgatctaataatttcacatagaaacggcaggcattggcaagactttttccaatttcttttgacgtccgtccatagccaggccttgaaggcgtaatgatggaatacccttgctcaatcaacgctgtgtatccgtattcctcgtaacaatttgaatgcccgccatgcatgacaaggatcggagttcccttgcctgtcacagaatattctagtgtactgccatcgaaggtgatcgtttcgactcgtcttttcatctgttactcccatttgttttttgcctattatagggttttcagcaattgaccacaaggtgaagaaatgaataaacacaagctcgtgaaatatgatatactttgtattgatattcattctcaattaaaatgatttgatatagatgtgaacgggaggcaggacggatggctgagaatcaagaggtatatgacgttacgataataggcggggggccgatcgggctgtttactgctttttactgcgggatgcgggagctgaaaacaaaggtaatcgaatttttgccgaagctcggagggaaggtgtctttattctttcctgagaaaatcattcgcgatatcggcggcataccggggattgcgggaaagcagctgatcgagcagctgaaggagcaggcggcaacgtttgatcctgatatcgtattgaatcagcgtgtgaccgggtttgaacgcctagatgacggcaccattgttctgacgggttctgaaggggagaagcactatacaagaactgtgattttggcttgcggcatgggtacacttgaggtcaatgagtttgacagcgaggatgcggccagatatgcgggcaaaaatcttcattatggagtggagaagctcgatgcgtttaaagataagcgcgtggtgatatcaggcggcggagatactgcggtcgattgggctaatgagcttgaaccgattgcggcgtctgtgactgtcgttcatcggcgtgaggaattcggcggaatggaaagcagcgtgacgaaaatgaagcaatcatcggtgcgggtgcttacgccttatcggctggagcagttgaacggagatgaagagggcatcaaaagcgtgaccgtttgtcatactgagtctggccagaggaaagacatagaaattgatgagctgatcattaatcatgggttcaaaattgatctcgggccgatgatggagtgggggctggagattgaagaaggaagggtgaaagctgacagacatatgcgaacgaatcttccgggcgtgtttgtggcgggcgacgcggctttttatgaaagcaagctgagattgattgccggcggatttacggaaggcccgacagcggtcaacagtgccaaggcttatctggaccctaaggccgagaatatggcgatgtattccacccatcataaaaaattggtgcataaataaaacagcccttgggggaaagggctgccagccatcagctgtgaaggagctttttctgcgtctgttgattctgaatgaaagctagcaattcatcctgttcttgtacagctgtgaatccataagcttcggcagctgagtcatcgcctatacagacgatagggggccggcttgctgacaattccggcgaaatgccaatttgttcgccaccattgatcaattgctgaacggacagcttgttcgggcaaatgaccatgtgcagcggggattcactgatggtacgctgaatcatgtgggtgaaccggtcatctatgacgttttcatgagtgatataaaacgaacaggattcatgcttttgcatgttttccactgcatggcggctcccgacaacaagacgtttctctgaatcaggctgaatggcggtgacaagaaagccccgtttctcaagctctgtctttgcttgctcagatgctgcactcagtttggctgtcagctggcggatgtcgattttctgagaagccagtgctctgaaaaattcacaaaccgcccggcgcgatgtgaaaaaaacgtcttcaaaggtgccaatctttcgaagaatttcttcattgacaggcatgttttcggtccgccatttcggccactcgatgagatcggcgccggaatcgcgcagcttgtctgcaagcgggtcttcatcttcgccatgagtcacaaccatcaaatgccgtccgatgagcggtttgctttcaaaccagctgtgtgtttgaaagttgacgatgtctccgatgacgataatcgcagggtttgtaatctggtgttcctgcactttttgctgaatgttctcaagtgttcctttcacactccgctggcggccccacgttccccattggatgacaatgacagggacagaaggcgatttcccgtatgaaataagctgctggcaaatataagacaagttcttgacacccatgtaaaaaacaagggtttgaacgcttcgggccagcccttcccagtcaaggttcggcgtgccttttaatgatttatcatgcgctgtaatcatggcaaaagacgatgcaaaatcccgatgcgtgacggggatgcccgcatatagcggcgctgcaattccagaggtgattcccggcaccatttcatagcgaatgccgtgctcatgaagagcatctgcttcctcgccgactctgccgaatacgctcggatctccgcccttcaagcgaacgacggttaacccatttaatgctttttcaaccagcagggcgttaatttctttttgtttcataaaatggcggtttggcagttttccgcaataaataaactggcagtccggtgatgcaaattcgagcagcttcgggttggcgagccggtcatataaaatcacatctgcttccttgagcgcctgttttcctttgatggtgagcaggcctgggtcgccgggtccggctcccacgaaatatacgattccgttcttcatgatcatgtcatccttccgtcactgtaaaaaatgaaggaccactagaaaagtgatccggtcttttgatcaatatacgagataaacatgttctccttcgatcagcgtttcatatgttttgacgcatccgtggtcaggttcttggacgattccgtcttctaaggaaattttccagtcgtgcatcgggcagaaaacatattgaccgctgacgatgccttctgccaggacgccgcccttatgcggacagcggttttcaatggcgcggatgcttccgtctgaaagcttgaaaaccgcgagctccttatcttcaatatacactgttttgcctaattgttcaggcaattcttcaatttttccgatacatacttttgttacgtctttgtttaccatgtccattcctcctcaatgatagtttttgtcattatgatgtggtcacgacattttcaaataattctttagaggtttgtttatcctctaaaaagtctttccacggatccttgtggacagagagtgtttcattcattcggccgttcagctcctgccgcttttccggatcgtttaacacggattggacatgggataaaccgacgcgctcaagccatgcggacgtacgctccagatagtttgcggtttccctgtaatattgcaggtaagcgcctgcgtattctaagacttcttcatttgttttcaccttcatcagcaaatcgccggcacgcaagtgggttccgccgtttccgccgacataaagctcccagcctccgtcgatgccgacaacgccaaggtccttaatgccggattccgcacagtttcgcgggcatgcagacacggccattttgactttgtgcggcgtgtttagcccttcgaattttttctcaagcgcaatgcccagtgccatggagtcttgtgtgccgaagcggcagaattgctcgcctacacatgttttcactgtgcggagcgtttttccgtatgcgtagcccgacggcatatcaagatcttcccataccttcggaaggtcttcttttttcacgccgataagatcaattcgctggccgcctgtcattttcacgagtgggatctcatatttgtcaacgacatcggcgatcttgcgcaaatctgtggagttggtcacgccgccgtacatccgaggaacgactgagtatgttccgtctttttgaatattggcgtgcattcgttcattaacaaagcgggatgtccggtcatcctcgtatttggttggattgatcatgcctaagtagtagttcagagccggccggcatttggaacagccttctggcgttttccagccgagcacattcatgacttctcttgtatgtgacagccctttggctttgatttcttctacgacttcatctcttgacaatgtggtgcagccgcaaatggcttctttttgcgctgacgcatcaaagtctgatccgagcgtatgctggaggatttcttctacgagtggcttacagcctccgcatgagcgggatgcgccagtgcatgctttgatctcgtccgttgacgagcagcccttttcctgtatggcttgaataatcgcaccttttgacacgccgttacagccgcagatgatttcatcgtcgctcatcgctgcggtgatgcttgtgcctgcttcttggttgagaggctgtaagattgatattttagaggtttcagagatatcggcttctttttgaatcatagaaaacaggcgattgccttcgctgctgtcaccgaataaaacagcaccgacaattttgttgtctctcaggacaatttttttatagatgccgtcctgctcatcgaagactttaatcgcttttttgtcctctgattcatcaaagtccccggcagagaaaacctcgacgcccgatacctttaactgtgtggagagaacggagccctcatacgggtttgtttcgatgccgcaaatatgcttcgccagcacttttgcctgttcatagagcggcgccacaagcccgtaggcgattcctcggtgctcggcacattcgccgaccgcgtaaatgtgcgggatttcagtctgcatataatcattgacgatgatgccgcggttaaccggaatgccgctctcggccccgagcgttgtatttgggcggatgccgacagccatgacgactaaatcagcttcaatgcttgtgccatccttgaatcggaggccttcgacacggtcgtcaccgacaatttcttctgtttgcttttcaagtaaaaaggtcataccttgtttttctaactcgttttgcagcaggcgtcctgccgttgcatcaagctggcgctccatcaggaatggggcaaggtggatgacggacacatccatgccaagattcagcagtccgcgagctgcttccaaaccaagaagtcctccgccgatgacggcagcttttttatattgttttgacgcggcgagcattgtgtctgtatcttttatgtcccggaaagctgtgacgccttttttgtctgcgcccggaatcggaaggataaaagggaccgagcctgtcgccaggatcaattcatcgtaaggctggattctgtctgcatctgtgatgactgttttgttttccgtgtccactttgatgactgtttcatttgtatacaattgaatgttgttttcttcgtaccagtcccaatcgtttaacgtaatatctttaatatctgtatcgccttgaagcacttttgacaaaaggattcggttgtaattgggatgcggttcggcaccgaaaattgtgatctgaaactcgtctttagcaatactcagtatctcttcaatggcccttaccccggccattccattaccaacaagaactagctgtttttttcccatcagatgatccgctccttatcaatgttttttccagcgtagcacagcaaaaaggaatatttaagatacatgttataaaatgtaacaaaatatacgaaaagttctaaaaattttatgaaaaatttaaataggtctgattcggacggcgcataccttaaaaccgggcattttacaggctggatctaaggcttccccgattaaatcattcacattttgagcgtctgcccaatggatgggaacaaaaacagtatcttttctgatttgttctgataatttgctgcggacggtgatgcttccccgcggcgattctatttttaccagtacacggtcctcgatattgtaggtcgctgctgtttgcggatggatttccataaacgattcaaaatgtctcgcggcaagggcggcgctttttcttgtttggacgcctgttaagtagtgagacatgactctgcctgtcgttaaataaagcggataatcggctgtcggcttctcttttggaacaggtggttcgtttggaatcacacttaatgccgctttttgatccggatgagcaaatgattctgtaaacaagcgcccagttccgggatgatcagattccggacacggccaatgaatgccgccttcacgtctgagcctgccgtatgagatgcctgaataatcggcaatcccgcctcggctcgcttctctcaattcattaaaaatatcctccgctgacgtataagaaaagtagcggcccttgccgagagcggatgcgagatcacaaatgatctgccaatcatgctttgcttcgccggggcatggccggcttgcttctcttaatgtcacgcgtccttctacatttgtcatggtgccttcatcttctaagtaagaggaggcaggtaaaatcacatctgcgtatttcgcagtctcagaaataaacaaatcgattgcaacaaagaatgtcagtttccttaaagcctttttcacgagattcgcatttgggctggagacagcaggattggagcacatgaggaacaatcctttgatgtcgccgtcgttgattttttccatcatttcataggctgagacaccttttcgcggcagatcatcctgatggattccccacactttcgcaacatgtgcccggtgttgttcgttttcaatagatcgatagcccggaagctgatcggctttttggccatgctctcttgcaccttgcccgttgccttgtccggtgatcgccccgtaacctgagtaaggcttgccgatttttcctgtgatcagcaccatgtttaagaagcctttcacagccgctgttccatcggtttgctgttcaatcccgcgggctgtaaacagcatgccggacgtttccttggcaaactttacagccgcttttcttatatccaccagggggacactcgtctgttcggcgatgtcattcaggtccaacgagtcagtatgctgcttcagctcttcgaatccatttgttcgtgattgaatgaaatcctcgtttataagctgttcgtcgatgatgattttgacgagaccgttggcaagggcggcgtctgtgccgggtttgattttcaaatgaagatcggcgatttttgttgtcgctgtttcacgcggatcaatggcaatgatgtaagctccgttttctttcgctttttcaaaatatggcataatcgtaggctggcactccgcgatattggtgccggccagaatgatcacacgggtgtggggaatgtctgataagggattcgttaagcctctgtccgcgccgaatgtttggttggctgcggttgctgcggcggacatacaaagcctcccgttgtagtcgatgtattttgtctgtaagcccacccgtgcgaatttccctaacaaatacgcctcttcatttgtaatcgaggcgcttccgtataccgccatagcgtcatggccgtgttctgcttgtatcattgtcacttggtctttaatgtaattcagtgcttcttcccaggaaacaggcataaactcgccgtttttcttcagcagcggccgggtgatgcgggaggagttcagggcatgctggtgggcgttcatgcccttcatgcatagccgaccctgtgttgtaggattatcaatcccgatcgcagtgtactttttgcgcgtgacgatggtttgttccacgagctgcattttgcactgcatgctgcaaaacgggcattgagtgtcatatgttttttctgattggacgtcttgctgtttatcacggaaatatctaagcagtcgttcagtcaaaatgcctcatcctttcttatatgcacccgtctctacagtcgggttttgaatcagtgacagatctgtttggaggctttccagcagctgtgcccttaggtcttcttcgaatagcacttctctgatatgaacgatcccgagacggtctatccactgatgaacaccttctaagtaatgagccgtttcccgataatactggatcagtcctttgatcatgccggcagtgctgtcttcgttctcagtcacgcaaaacaaagctcctgaacgggcatgagttccccggacgccgccgatgtgaatgtcccagccagcttgtctccgaattgcgccgacatcttgcagggcggcatcggtgcagtctgtttcacatgataagctgatagaaatgggagcgggtaagggaagcgtctcaagttgtctttcgatttgggctgccagctgctgaatcgatcgattttgcccgcatgtacatgctttgatgctttgcagcgtgtgtcggtgttcattggtgtaaacgggcattttcagatcttttttcatgttcgggagatccgcaggcttgatcccggaaagcttcagcctttggccgtgagtgatggatacgtcgggaatgctgtatgcctcaatgatgttggcgatggttcttagctgctccgcgtttgtccgcccgccgtacatttgcgggatcaggatgcatgtctcttcagtggctggctcaggctggacaaacccagggtacagcatttccagatagtattgaatcgcaggaacacaagtactgcatccgttttttgttttccagccaagctggttcatcacttctgccggattagtgaatggcctgcgctgaagctcagcgatgatgtcgtcttctgtaaaatcagtacagctgcaaaacgaaggtgtgccggcgggcttcgtatattcgctgttggtcatgtatctcaaaaggtcttcaacgagcggtttgcatcctccgcaggacccagtggctttggtgcagtgcttgacttcctcaacagttgttaagcttttcgtgtacaccgcgtcttcaatcgcgcctttcgtcactgtgttgcattggcaaatcgtttcactggaaggcatggattcaaataaagggccgcttgtctccggttcgatgatctgctttttgacaatggagatgtctcgttgtttaagcaggctgtcgagaagccgctgcttgtcatgggtgtctccgaataaaataacgccggccagtttgtcatctacaaaaagtgcttttttataaacgcctgcttgttcgtcgtagattttgatgctcgtcgtgcgttcatcctcttggatctttcctgctgaccacacatcgattccagctatttttaacgccgaagatggtgctgagccttgatattcctcacatggaacgccgcaaatatgactggcgagaacttttccctgctcataaagcggagccaccaatccgtacaccgttccgttatgctcagcgcattcaccaacggcgtagatattcggttcgcttgtctgcatgaagtcattcacgatgatcccgcggttcactttgattccagcagatacagccaattcaatattcggtttgacgccggccgccatcacaatcaagtctgcttttaatgaagagccatctttaaaatggattcggtctgccttcgtggcgccggaaatggagacggtgtctttctccaaaagaaaggttaggcctttttgttccagctctgtttgcagcagccgcgccgctgtttgatcgagctgtttttgcataatgccggcggagtggtgaatgacgctgacattcataccgagatgctgtaaaccgactgcagcttccagtcctaataagccggctccgattaccgcagccttttgaaagtgctgggccatcttcatcagtgcttggcagtcttctattgtccgaaatccatagacaccttttttgtctgccccggggatagggagaatatgaggggaggagcctgttgccactattaatttgtcatacgacagagtgcgtttccgatctgtgatgacctgctgctgatctgtatcaatttgaataaccttttcgcctgtgtaaagcgtgatcccgttcttgtcgtaccaatccttgctgttcagtgtaatgtcatcgagtgacgcttcaccctgcaatacagaggataagagaatgcgattgtaattgggatgcggctcgcttccgaaaatgacaatctcaaacatgtggcgattcagctttaatacttcttcaatacagcggattccggccatgccgtttcccgctaacaccaatctttgtttcttcatgtattagacctcctttggcgaagctcgtaagttttctcctattaaaaattatgtcacaatgcactgttaacgcattaaacgtgtcacaaaaacttacacatgtcttttccagaaaataatggtcctatatccttgattcagaaaatgtaaaataatgagggtctagaaaggggaatcttatgaagctgtcggaactgaaaactagcggtcatccactcactttgctctgttcctttttatactttgatgtcagttttatgatatgggttatgcttggggcgctgggtgtttatatttctcaggattttggcctgtctccttttgagaaagggcttgtcgtagctgtgccgattttatctggatcagtgtttcgtatcattcttggtattttaacggatagaatcggaccgaaaaaaacggcagtgatcgggatgctggtgacgatgattccgctgctttgggggacattcggcggccgttccctgactgagctgtatgccatcgggattctgcttggcgtggcgggggcaagttttgctgtagcgctgcctatggccagccgctggtatccgcctcatttgcagggacttgcgatggggattgccggagcggggaacagcggcacgttgtttgcaaccctgtttggccctcgtctggcagagcagttcggctggcacattgtcatgggaattgcgctaattccattattgatcgtctttattctttttgtatccatggcaaaggattctcctgcacagccggctccgcagccgctcaaaagctatctgcatgtgttcgggcaaaaggaaacatggtttttctgcctgctgtacagcgtcacatttggcggatttgtcgggctctcaagctttttatctattttctttgttgatcaataccagctatcaaaaattcacgcaggggacttcgttacattatgtgtggcggcggggagctttttccggcctgtcgggggcttgatttcggatcgtgtcggcggtacgaaagttctttctgtattgtttgtcatcgtggcactgtgtatggccggagtcagcagcctgccatctctctcaatggtcattgttctattgtttgtcggaatgatggggctcggaatgggtaacggtgcagtattccagctcgtgccgcagcgttttcgcaaagaaattggcatggtgacgggaatcgtcggtgcggccggaggaatcggagggtttttcctgccgaacatcttaggatctctcaaacagatgacaggcacatatgctatcggttttatcacgttttcctgtatcgcgctgctggcgtttgcacttgtgcttgccgcaggctattactggcggaaaagctggagcgcggaaagcagcccggcggatgtttaggattttgacggacacgcgtttgtgcgtgtcttttttattttctcttgattttcaacagtgaaccgatcaaaataaatagtaattattacgatttgttagtgagaggagttttctgaatgaatcaacatacgctgctcccgaaaaaaacggagcgtcttcaatactttggatcggtcagtccggtcaaaggcgagaaaccagtggaaaaagagaaaatgaaggacctgcaaaatatcaggaaggattatttttttgacattcagcatgtaggtgtcgctaatgtgtcccatccagtcacaatcacttctgccatgatgcctgccgagcaaacaacggctgcgaactttacaatgacttgtaatttgccgagaaatcagaaggggattaacatgagccggttaacagagctgctgcaagtctatcatcaaaatggctggattctctcattttcctctcttcagcaatttacgaaagagcttgcagaaaacatggacacatcatctgccacagttgaagtgaggtttccgtggtttttcgaacggaaaagcccgaagcttgagaaagcgggtttgatgcatgctgatatattcatgtctgtcacctatcacaaagatcagccgtttaaacagcgtgccggcatctcagcaaaagtaacgactctgtgcccttgctccaaggaaatcagcgaatacagtgcccataatcagaggggaacggtcagcatttgggcggatattcacccggccgcatcgctgccaagcgatgttaaagctgatttgcttcacgccgcagaatcaaatgcttctgcgagactgcatccggtattgaagcggcctgatgaaaaagccgtgacagaaacggcctatgaaaacccgagatttgttgaggatctcgtccggctgattgctgctgatttgtttgagcttgaatgggtgtcggcctttgagattgaatgccgcaatgaagaatcgatccatctccacgatgcctgcgcgaagctgcgtttttcgaaggaagtggataaaatatgaaactctcattattcattattgcagttcttatgccagtcagcctgctgtcagcctgctccgatcatgcagaagaacacgcaagtatcaatacaaagaaaacggtcgaaaacataacggacgttcgaaaaacagcaaaaacaagcattgattggacaaagccttcgggcggagaatacccggatattaaacagaagcatgtctggattgatgtgaatgtgaaggagcagaaggcttacatcaaggaaggaagcaacaccatctatacaatgatgatctcttctggtcttgatcaaacaaaagatgatgctacgccaaagggcaccttttatgtagagcctgaacggggagaatggtttttctccgaaggataccaggaaggcgcagaatactgggtatcatggaaaaatcacggtgaatttttatttcatagtgtgccaatgactaaggatcaaaaagtcatcaaaacggaagcagaaaaactaggaacgaaagcatctcacggatgtatcaggctgaccattccagatgcgaaatgggtatatgaaaatatccctgaacatacaaaagtggtgatcagctgaattgaaaaccgttgacaaaaaggaaaaaagaccatacaatttaaatcgtaacaattgcgttttatgataaatggcttatcattggctgtatctgtgaaaagcggaaaggctaaggatcttgctgtcattgatccccatgaagcgtctcttgaaaactggaaacgaaacccaagctactttctgatgagatatttgcgctttccatcggttcagcaacgcaagtggagcgattgctttatgcaagctgcggttttccgaatgtcggcaaggatttgcgatggggaaaaggattaaacgcggttgaagcctttactgatttagaaaccgggtggcagcgagaaatgagcgcgaaaagctgctctacactattgtacatatggcgaagtatacaatttaaatcgtaatcattctattttaatggaggcattattatgaaaaaaattccggttaccgtactgagcggttatctaggtgcgggaaaaacaacattgctgaacagcattctgcaaaatcgcgaaggcttgaaaatagcggttatcgtaaacgatatgagcgaggtgaacattgacgcgggcttggttaagcaggaagggggcctttccagaacagatgaaaagcttgtggaaatgtcaaacggctgcatttgctgcacgcttcgcgaagacttattaattgaagttgagaagctggcaaaagacggacggtttgattatatcgtcatcgaatcgacaggaatcagcgaaccgatcccggtggcccagactttctcttatatcgatgaagagatgggaatcgatcttacaaaattctgtcagctggatacgatggtgacagtggttgatgccaaccgtttttggcatgattatcagtcaggcgaaagccttctggaccgcaaagaggcattgggggaagaggatgaaagagaaatcgccgacctcttgatcgatcaaattgagttttgcgatgtactgatcttaaataaatgtgatttggtcagcgagcaagagctcgaacagcttgaaaacgttcttcgtaaactgcagccaagagccaggttcattcgttccgtcaaaggaaatgtaaaaccgcaggagattttgcatacagggttatttaacttcgaggaagcgagcggatcggccggctggattcaagagctgacggcaggccatgcggaacacaccccggaaacagaagaatacggtatctcttcatttgtatataagagacgtttgccgtttcattctacacgattttaccgttggttggatcaaatgccaaagaacgtggtacgtgccaaaggaatcgtctggtgcgcatctcataacaaccttgctttgctgatgtcgcaagcaggtccgtcggttacgattaagcctgtatcttattgggtggcggcgctgccgaagcttgagcaggagcaagtcaaacagcaggagccggaaatcctggaggagtgggacccggagttcggcgaccgcctaacgcagctagtttttatcggaactgacctggatgaagaaacgatcacgaaagagcttgatcaatgcctgctgactgaatatgaatttgattccgactggtcgctgtttgaggacccgtttaaatggaagctgaatcaatagaaaaaaagccgtcccctggggagcggctttttttaatgaaacgtttgtttaaacataatgagcgtattttttctcaaggatattctgaaagaccgcggcaatggagcagatggcccaataaatgagagcggtcagaatatacatggtcatataatcaaactctctgcccccgatgattttcgcatgctggagcaattccggcactgtaatcatcgcagcgagagatgatgccttgattaagtcgagcaatacattggcaagcggaggcagcgcaatacgtatcgattgcggcaaaatgatgcccctcatcgtctgccaataggaaagacccagcgaggatgcggcttcccactgtcctttttcgacggatgaaatggctgaacggttaatttccgcaatgtaggcggcgctgtttaggctaaagccgattaaagcagccgtgacagcggaaaattcaatgccgatataaggaaacccgaaataaaggataaacaaaatcaccaaaatcggaacgccccgcataaatgagatatagagcttcgccggccatcttaacaaagcaagcttagacattctggcgagtgatatgaacaggccgatcacagttcccgcaaacatgcttacaaaagagataagcagtgtatacccaatgccttttatgacataagggaacgattcaatagccagcttcgtgttgaaaatatattcccattgaatgctattgatcatggcgtccgattacaaatcaacgtcctgaacgtcggcatcaattttttttgatacatctgctttattgaagaattgtttcgacagtttagtcaaagagccatccttgctcatctctttcaatgcttcgttcatctttttctgaagtgccgcattgctttttttcatgacaagggcctgtttgttcggcatgtacttgatgtcaggatgaattgttatgttgagatccgggaatgccgcgagcgcaagtgtctgcaggtaatagtcgtttaaaatgacgtcagtgcgtccgttggcaacatcttttaaatattgctcattcgtcgcattatcataaatcacttctttggcgccgtattttctcgcgacctccatgtagacggttgtagccgcgccagccgctttcttcccttttaaatccttgagcgttttaatccctgataaattgtcttttcggacaattgccgtgccgtatgaatatttataaggagtagaaaatgcgaacttcttctcgcggtccttcgtcacatcgatgtcattcgcggctgcgtcaacctgtccgctgtttaccgctgtcagcatcccgtcaatgcccatctccttgaactcaaccttcaatcccaggcgttttgccgcttcacgaacgacttcaacctcgtagcccgtcagcttatcagagccagagtcagtatcgtgataagaagtgggataaagcgtgcctgatgtagcgactacgattttccctttatccttaatctgctcccagcctgtatccttggaatcggcttcatttttgccggaacaggctgccaatataagaaagaaagccattgtgaaactgaatataacggctttggaatgcatgaatgatttcacctatagttcccccaatctgttaatcaactaaaaagatagcattgaacataaggggttgcaatatgttgatcgcgttttcaaaaagttcgaattgtgtatacaaaaggcatgggtgggtgattaaaagcggctatgaagggaattggtgatgaacaaaggagttgtccaaggatgaatgcccgacgtaccaaggaaacacatgtggacgtgaaggatgcagtagatccgttattcctctatgccaataccgtaagaaatggtcagaagcatgaaatcgatcttcagaataaatttaagtcttgctgatgcccctaagacatatgatatatccgatgagaaagaaaatggaaacatttaaaccataatggggagtcaaatgaatatttacaaaccagccggattttggatcagacttggagctgcattgttagactatattatagtctccgtgccgcttttgctgatctattggctgattacaggaaaagacccaaacgacagcatgttcatcagtttggttgttctgctgtattctattttgctgccggtgttttggcgcggttatcttatcggaaaaaggatctgcggaatcagaatcgtaaaaaaagacggatcacaggtcagtctgttaacaatgtttttacgggttattgtagccggcctggtttacgttataaccttcggactcggcttgatcgccagcctgattctgattgccgtacgagaagacaaacggaccctgcatgatttaatcgcgggaacatcacttatgcgaccaggtgaagaagaacttaatgctgacgaagagattagaaagagcgaataatggttcgctctttttatttttatgcataaaaaatacaaggcagcaaaacatatgaaaaataggattggaggaataaactggatgaaacgaataaccatcaacattatcacaatgttcattgcagcggctgtcatttctctgaccggtacagctgaggccgctgaaaaacagcagcagtctcccgcaaatgttacactgacagatcagcaaaagaaagagattgaacaactggaagcagagattcttaaaaagcgcaaagacgtgatctcaaagtatgtacaatacggtatcctgcctaaagaaagaggagaacacatcaaaaatcacttggacaaacactttgaaatgatgaaacaaaacggctttgttccaaagcaccatcctcatccgcataaatttgaaaaaagacattaaaatggaaagcatccaatgggaattgggtgcttttttattgttaaaagttactgaatgaattttccggaaaaatatatcgcttttgttgattatatcttataataagatataaatggggtgtataatgatggaaatggatttaatctctaaacttaatcagcagtggacagatatttattatttattacattatcaacataaagataatatttctcaccaggcaatacggattatgcagcatattgaaaagcaaggtgaggcaacaataggagctttggctgaatacttgtctgtctctcacaatacggcgtcagagcatactaaacgtttgattcaaaggggatttatagctaaacggcgaagtcaacaggatgaacgaaaagttttagttttcttaacacaagaaggaagatctgttcttgaacagcatacacagctagataaagagaaattaaaagaaataattgaacgaatgagcacattagaaaaagaattacttgaacaggcatttgaacttttaagtagggaagctaaacaatggcagttttaagtaaagtgatcatctctgcgttgattatcggttttgttactgaaatatcaaaaagacatccgacctatggcggcatcattgctgctttgcccttggtcagtttattaagccttttttggatgcaaatacaaggtgaaaaaatagctcaattaagtcaatttgcatctggtgtgcttacaggaatcccagctacagtttgtttactagctattttggcttttttgctgaaaattcatgtgccgttttggtttgcattatgtgttggaatactaggatgggctatgtttttatggatgcagaagatctttctcaatatattatttaactgagtatagaaaggagatgctatgtttttaaaaaaggttactcttcttcgagataagattttggactttgacagatttccttttactatcccggctataagtcaattaaatgacatcttatttactagccaagtgactttttttgtgggggaaaatggatctggaaaatctactttgcttgaagcgatagcagataagtgtgaattcaatacagcgggcggaagccgaaataatgtctatgaattacgggagtcagattcccatttaggagattacatacgtttatcttggcttccaaaggtaacaaatggcttcttcttaagggctgaatcgttttatcatctttctcttcatctggatgagatggaactagatgctcctcagccataccgttcctatggagggagaccgctacacaatcaatcacatggagagtcctttatgtctctattccgtcatcgttttaaagagaaagcgatttaccttttagatgagccagaagcagcactttctccagctagacaattagcttttttgagagttatacatgatttggtgaagggcggaaatgtacagattatcattgcgactcactccccaatcctactgggctatcccaatgctaatattttaagctttgatggtggaagaatacatcatattgaatatgagaatacagagcatgttcaattaacacgatattttcttggacaaagagaaaaaatattagctgagctgttccgcgactaacatcgagttgatctgaaacgcgtttcatagcctatgataggtttatcaaataattcaggagtgataaacactatgatccaccagcatccagaatcttttccgaaacattttttgtggggctctgcttctgcagcgtaccagattgaaggcgcttggaatgaagatggcaaaggcccttctgtttgggatgtgtttacgaaaataccgggcaaaacgtttaaaggaaccaatggcgagattgcggttgaccattatcaccgatttaaagaagatgtcgctctgatggctgagatggggttaaaagcatatcgattttccgtcagctggccacgggtttttccaaaaggaaaaggagagatcaatgaagcaggtctagcgttttacgatagtctgattgatgaattgctttctcatcacatcgagccggttctgactttatatcactgggatttgcctcaagcgcttatggacgaatacggcgggtttgaatccagaaacatcatagaggattttaatcactactgtattactctttataaacgttttgaagacagggtgaaatattgggttacgttaaacgaacagaactacaattttaatcacggatttattacagccatgcatccgcctggagtgaaagacagaaaacgattttacgaagcaaaccatattgcgtttctggctaatgcaaaagccatcgaatcatttagagaatatgtgcctgaaggcaaaataggtcctagctttgcttattctccggcttaccctttatcaagccatccagaggatatactggcatttgaaaacgccgaagaatttatgaacaattggtggcttgacatgtattgctggggaacctacccgcaaattccattccgctacttggaaaaacagggatgggcgccgacaatcgaagcaggagatatggagctgcttgccaaagggaagcctgattttgtaggtgtcaattattatcagacgatcacctatgaacgaaatccgcttgatggtgtgtctgaagggaaaatgaatacgacaggccaaaaaggaaccaatcaggagacggggatacccggggtgttcaaaacgaaaaaaaatccgcatctgacaacgagcaactgggattggacaattgacccaattgggctgcgtatcggtcttcgccgaattacaagccgctatcagcttccagtgtttataacagagaacggtttgggtgaatttgataaagttgaggacggcactgtacaggatgattatcgaattgattatttgcgttcgcatcttgagcaatgcagacaagccatcagtgacggtgtcgatttaatcggctattgcagctggtcgtttactgatctgttaagctggctgaacggctaccaaaaaagatacggatttgtatatgtcaatcgtgatgaagaaagcacatacgatttaaaacgcttgaagaaaaaaagcttttattggtatcaagatgtcatcaagacgaacggagaaagtttataaagagtccctgagagttattctctcaggggtttttcattacacagaaacagcatcaataatataagtgtcggcgtgcaaatctgacatttcagccggcacagtccagcatgtcaattgatagtctcctttaggcagatcaaaggacagtcttttagacatgatgctttcaatatgaattccgttttctgtgacatgaaaaggaacagtcacttttttttcgtaggagcttactgtttctgaactgttcaggcgcaaaagaataaaggcctttgtatttcgctgtgcctcaaaggaaatggctccgtctgccgcagcatatcctttttcaatcgcttcgtcagtccaatccattacaggaggtgtagaatccttttgaaatacagtaaattgatgatatgaaatcgaaagttcttgcggcttccatgatttgatcaatgtgctgttcctcctctatgtactgtttactgaattgtgaataaaacctttgtgccgtctgggtaatcggtaagctgatgcccgacccaagagcctgctccgcggttgtcagcgggagaaatgtattctacagaagctccctcaccgccttctttgcacatggccattggccattcatctctgtcatacccctttttggaaggtacgtcctttaatgattgctcgcggcgttcctcagctccgtctctgtcaatagtgcacacctctgagtgcccctcatttatcgcatccttaatatgcttggcagtttcgggataacggtcagaaggaaaggtgattgtttcatcatattctttcgtttgagacgttttttgatcagctgagaaaaagtctccttttatcaggccgacagctgcagctgctatgatgacgatgacgagaagtatcgtttttatgatgtccgtcgtgatgttcacctcccgcttttaaaactgacacaagagtaatccagaaagcatttggtgtaaaggtttaaattttatgttttacgatcagtttattgcagaaatcgtaattttagcagatcgaaatatttgttttcagcaaaatacgattgccaatttacaataatgatagtaagtcatcagccgttttcggcttgattaatcattttaaattggcttatgataccggtaagctcctcagctaattgagaaagtgtttcagaagctgcggtaatctcctccattgcagcaaattgctcctctgttaatgcagccgcttgccgggtatttttagtagattctttaatgtcggccgtattggctgcaaaggaatcatttatttgatgtgcactggctgaaatgtttgttacagatgctgataaatcactaatctcggcgctgatttcacctgttgcagctgcaatttccttaaatgcatctctggtgcgctggatcatggtgactccttctgcagcttctgttttcacatgctcaacagatcttgcagaccggttcatatccttttgtatttctatgatcagttttgaaatctgccccgcagactgttgagactcttctgctaatttccgtacttcatcagcaacaacagcaaagccttttccttgttcaccggctctggcagcttcaatcgctgcattcagcgcaagcaggtttgtctgatcagcaatttgggtgatgaccgataaaatttgctcaatttgtttagagcggccgtctaactggtgtatgatttctccgcttttctgaattgactggtgaatcgcatccatttgcgcctgtacatttgcaatttccttttgtccaatgtctgcttttgattgagcgagctgccctttgtcagcgatagcggcagtatttgcagaaatatcccggatgtctgctgaagcttgttttaatgagctttcactattttcaattcgggtgatctgatcttgggctccatttgcaatctgctgtacagcttctgtgattttttctgaagcttgatttgtttcctctgctccggctgagagctgctgagaggctgacgcaagctgaagggctgattgttgtacggtttgtatggtatcgttcagcttcattctcatcttattataatagacgcttagttctgaaagctcgtcaccggttttgtctgacacctctattgtcatatctccgtttccggcactttcaaaggcgctttttaaagcgttcagccgcttgttgatttttctggtgaaaaccaaaacaaggatgactgatactataatgacgataacaagaacgatagcgaattgagtgaaaagtgattgtgtaagtgatgctaaaatactttgattagctccggtatacagcatgccgatgatgttgccattttgatcttttaacggcatgtatgcagtctgataagaagaacctgctacatctgcttgtccgtaaaaacgctttcctttctttaaaacagcggcaataacttcagaagaagcctgggtgccgacagctctttcgccattcttcatgacattggttgcaacacgagtatcgccttggaaaatggtaatggtatcacctgtcttttcaccaagcagatcaacaatatcttcatttccattgatttgtgtttgccctttatagagcttattgtttttcacctgccagtcgcctgacatgacatcatcaatataagtgctgcttaaagcgagatcacctttcgctttttcagttgccatttgtttcatgttttctgtaatttccttaagcatcacagtgccaactgatgccgaaaacaaaagaatcaccacgaaaacgaggcaaagaattttagttcctagcttcatcttaaatcgttttatcaacataattcctccctttacgatttgcaggtcatattacttatcgggtttttgggtttaaagttttattttagaaaaaataaaaccgacctgatcttcaggccggttgtgtgatgctattcaaggtttgcgtggtgagtgaacatagtttcagaatcgagtccttttttctccatgagttttaaaatcactgcatcatagaatagcagcaaagtttgttcaaataatgatcccattggctgaatggttttatagcttccgtttgactggtctttaggagaaccaggcattctgatgatgaggtccgcttgttttccgatgcttgattccggattgatggttaaagcggcaacaattccgtgtaagctttttgcttttgctgcggtatgaatcaagctttttgtctcgcctgatcctgagccgataataactagatctcctttggcgagcggcggagtgagaatctcacctacaatatgggcgttgaagcccatgtgcatcagtctcatcgcgaaggattttgccatcaggccagaccgccccgcacccgcggtgaaaatttggtgggatgaaagaatgtgatcggcaagctggtcagcttcttcattagaaatataagctactgaattgtgtaactcattgagaatttccgctacgtattcagtcgttttcataggagttatccttggacaatcagctgcttcatttttgaagctgtttccgccttatcagctgcgcttgtaattccgcccccaacaatgacaaggtcagggttttgcttgatcacttctggcagtgtatcaagtttgatgccgcccgcgattgcggtttttgcgttttttacggtatttttgattgtcgttaattcttcgaaagagtttttgccctctgcttgaagatcatagccagtgtggacgcagatgtagtcaacgcctagtgcgtcaatttctttcgcacgggattcgatatctttcacgttaatcatgtccactaagattttcttcttttgttttttggcttcttctactgcgcctttaatcgttgcatcgtctgtagcccctaaaacggtgatgatgtcagcgcctgcttccgacgctttcataatttcgtagcctccggcatccatgattttcaggtctgcaagaaccttcaattgaggaaatgcttcttttatttctttaacggctcttaggccttcattgatgacgaccggtgttccgatttcaactacgtcgatgtattgttctacctctttgacgagctcaatggcttccgggatgttgacgaggtctaatgcaagctgtaattccattgttgattcactccctttttcgaattatttttcattctataggttctcttatttgatgagaagtaggcactttgaagtcaacaagttacttggaggatactgtgaggagagacaatcagatttctttcgcttgattttatgagtgagtataatgaaaaaagagtctgcaaaaaagtaagtaagtgatgatacgtatctaacatacaaaaagattactaaggggggattctattgagccggatggacgacaaaaggtttaattgtgagaaggaattaacgcttgcagtgattggcggtaaatggaagatgctcattttatggcatttaggaaaagaaggcacaaaacggttcaatgaattaaaaacattgattcctgatattacgcagaagatcctcgtgaatcagctgagagaacttgagcaggatatgattgttcacagggaagtgtatccggttgtcccgccgaaggttgagtattctctgaccccgcatggagaaagcctcatgcctattcttgaagccatgtatgagtgggggaaaggctatatggaattgattgatatcgacaaaaatgtcatgaaagaatcgttgtaagacgctcttcgcaagggtgtcttttttttgcctttttttcggtttttgcgcggtacacatagtcatgtaaagattgtaaattgcattcagcaataaaaaaaaattgaacgcagcagtttggtttaaaaatttttatttttctgtaaataatgtttagtggaaatgattgcggcatcccgcaaaaatatccctgtaaataaactggaatctttcggcatcccgcatgaaacttttcacccatttttcggtgataaaaacatttttttcatttaaagtgaacggtagtaagataaaaaatattgaaaacaatgaataaatagccaaaattgtttcctgttaggataggggttcttgcggtctttatccgcttatgttaaacgccgcaatactgactgacggctgcccgttttaatagcggcaatctgttttttgtttggaagcactgctttttaagtgtagtactttgggctatttcggttgttagttcataagaattaaaagctggtatggataaaaaagagaaaatgctctgcacaagttcactgtttatgaagactaggggaggtatgaaaatatggaaataactttttatcctttaacggatgcacaaaaacgaatttggtatacagaaaaattctatcctcacacgagcatttcaaaccttgcggggattggtaagctggtttcagctgatgcgattgattatgtgcttgttgagcaggcgattcaagagtttattcgcagaaatgacgccatgcgccttcggttgcggctagatgaaaacggggagcctgtacaatatattagcgagtatcggcctgttgatataaaacatactgacactactgaagatccgaatgcgatagagtttatttcacaatggagccgggaggaaacgaaaaaacctttgccgttgtacgattgtgatttgttccgtttttccttgttcaccataaaggaaaatgaagtatggttttacgcaaatgttcatcacgtgatttctgatggtatctccatgaatattctcgggaatgcgatcatgcacatttatttagaattagccagcggctcagaggcaaaagaaggaatctcgcattcatttatcgatcatgttttatctgaacaggactatgctcaatcgaagcgatttgaaaaggacaaggcgttttggaacaagcaatttgaatcggtgcctgaacttgtttccctgaaacggaatgcttccgcaggaggaagtttagatgctgagaggttctctaaagatgtgcctgaagcgcttcatcagcagattctgtcgttttgtgaggcgaataaagtcagtgttctttcggtatttcaatcgttgctcgccgcctacttgtacagggtcagcggccagaatgatgttgtgacgggaacctttatgggcaaccggacaaatgcgaaagagaagcagatgcttggcatgtttgtttctacggttccgcttcggacaaacattgacggcgggcaggcgtttttagaatttgtcaaagaccggatgaaggatctcatgaagacactccgccaccaaaagtacccgtataatctcctgatcaacgatttgcgtgaaacaaagagctctctgaccaagctgtttactgtttctcttgaatatcaagtgatgcagtggcagaaagaagaggatcttgcctttttgactgagccgattttcagcggcagcggattaaatgatgtctcaattcatgtaaaggatcgatgggatactgggaaactcaccatagattttgattaccgcactgatttattttctcgtgaagaaatcaacatgatttgtgagcgcatgattaccatgctggagaacgcgttaacgcatccagagcataccattgatgaattaacgatgatttctgatgcggagaaagagaagctgcttgcgagggccggcggtaaatctgtgagctaccgtaaggacatgacgatcccggaactgttccaagaaaaggctgagcagctttcagatcatccagcggttgtattcgaagatcgtacattgtcctatcgaacgttacatgaacaatccgcacgcatcgccaatgtgctgaaacagaaaggggttggcccggacagtcctgtcgcggttttgattgaacgttctgaacggatgattacagctatcatgggaattttaaaagccggcggagcctatgtgccgattgatccgggttttcctgcagagcggattcaatatattttggaggactgcggggcggacttcatcctgactgaatcgaaggttgcagcgcctgaagccgatgctgagctgattgacttagatcaggcaattgcggaaggtgcagacgatatgacggaggctgatgtaaacgcgcggaatcttgcctacattatttacacatcgggaacaaccggacgtccgaaaggcgttatgatcgagcatcgccaggttcatcatttggttgaatctctgcagcagacgatttaccaaagcggcagccaaaccctgcggatggcattgcttgcgccgttccactttgatgcgtcagtgaagcagatcttcgcgtcgcttcttttgggacaaaccctttatatcgtaccgaagaaaacagtgacgaacgggaccgcccttgctacatattatcggagaaacagcattgaggcgacggatggaacaccggctcatttgcaaatgctggcagcagcgggcgattttgaaggcctaaaactgaagcacatgctgatcggaggagaaggcctgtcatctgttgttgcggacaagctgctgaagctgtttaaagaagccggcacagcgccgcgtttgactaatgtgtacgggccgactgaaacgtgcgttgacgcgtctgttcatccggttatccctgagaatgcagttaaatcagcgtatgtgccgatcgggaaagcgctggggaataaccgcttatatattttggatcaaaaaggccggctgcagcctgaaggcgtggcgggtgagctttatatcgcgggagacggtgtgggccgaggctatttgcatttgcctgaattaacggaagagaagtttttacaagatccattcgtgccgggcgatcgcatgtaccggaccggggacgtggtgcgctggcttccagatggaacaatcgaatatttaggcagagaggatgaccaggtcaaagtccgcggataccggattgagcttggggaaattgaagccgtgattcagcaggcgccagacgttgcaaaagccgttgttttggcacgccctgacgaacagggaaatcttgaggtttgcgcatatgttgtgcagaagcctggaagcgaatttgcgccagccggcttgagggagcatgcggccagacagcttcctgactatatggtgccggcttactttacagaagtgacagaaattccgcttacgccaagcggcaaagtcgaccgccgcaagctgtttgcactagaggtgaaggctgtcagcggcactgcctatacagcgccgcgaaatgagactgaaaaagcaatcgcagccatttggcaggacgtgctgaacgttgagaaggcggggatttttgacaatttctttgaaacgggcgggcattcattgaaggccatgacccttttaacaaagattcataaggaaacaggcatcgagattccgcttcaatttttgtttgagcatccgacgattgcggctcttgcagaggaagctgatcacagagaaagccgggcattttcggtgattgaacctgctgaaaaacaggagcattatccgctttctctggcacagcagcgaacatatatcgtcagccagttcgaggatgcgggagtcggctacaacatgcctgcggcagcaattctggaagggcctttagatattcaaaaactggagcgcgcatttcaggggttaatccgacgccacgagtcattgagaacatcatttgttcttgaaaacagcacgccgagacagaacattcacgatagcgttgatttcaacatcgaaatgattgaaagaggcggccgctcagatgaggcaattatggcttcattcgttcggacatttgatttggcgaaagctccgctgttcagaatcggtttgctggggcttgaagagaaccgtcatatactgctgtttgatatgcaccatttgatttctgacggtgtatccattggcattatgctggaggagttagcacgcatttataaaggcgaacagcttcctgagcttcgtctccagtataaggactacgctgtatggcaaagcagacaggctgctgaagggtacaagaaggaccaggcttattggaaggaagtctttgcaggcgagctcccggtgcttcagcttctgtccgattacccaagaccgcctgttcaaagctttgaaggggatcgggtgtcaatcaagctggatgcgggggtaaaggatcgcctcaatcgtttggctgaacaaaacggcgccactttatatatggtgatgctgtccgcttactatacgcttttgtcaaagtatacggggcaggatgacatcattgtcgggacaccgtcagcgggcagaaatcactccgatacagagggcattatcgggatgtttgtcaatacgcttgcgattcgcagtgaggtgaagcaagatgagacgtttacccaattgatctcgcgtgtccgcaaacgggtgctgaatgccttttctcatcaggactatccgtttgagtggcttgttgaagatttgaacatcccgcgtgatgttagcaggcatccgctgtttgacacgatgttcagccttcaaaacgcgacagcaggcattccggctgtcggcgatctgtccttgtctgttcatgagaccaatttcaagattgccaaatttgatttgaccgtgcaggcgagagaaaccgatgaaggcattgagcttgatttggattacagcacaaagctgtttaaacaaagcacggcaaacaggctgcttacgcattttgcgcgtttgcttgaagatgctgcggctgatccagagaagccgatttctgagtataagcttctttctgaagaggaggccgcttcgcaaattcagcagtttaacccgggcagaacaccttatccgaaagataaaacaattgttcagctgtttgaggagcaagcggcgaatacgccagaccatactgcgcttcaatatgaaggcgaatcactcacttatcgtgaactgaatgaacgggccaatcgtttagcccgcggcattctttctcttggagctggcgaaggcagaactgcggctgtcttatgcgagcggtcaatggatatgattgtgtcgatcttggcagtattaaaatcaggttcggcttatgttccgattgatccggaacatccgagtcagcggatgcagcatttcttccgtgacagcggagcaaaggtgcttctcactcagagaaaattaaaggctttagcggaagaagcggaatttaagggcgttatcgtgctagccgatgaggaagagagctatcatgccgatgcgcgcaatctcgcactgcctcttgattctgaagcaatggccaacctgacgtatacctctggaacgactggaacacctaaggggaatatcgtgacacatgccaatattctccgcacggtgaaggaaacgaattatctcagcattacagaacaggatacgattctcggtctttccaattacgtgtttgacgcgtttatgttcgatatgttcggatctttgttaaacggagccaagctggtgctgataccgaaggaaaccgttttggacatggctcgtctgtcccgcgtcattgaacgggagaatatcagcattctcatgattacaaccgctttgttccacttgcttgtggacttgaatccggcgtgcttgtcaacgcttcgcaagattatgtttggcggggaacgggcttcggttgagcatgtcagaaaagctttgcaaacggttggaaagggcaagctccttcacatgtatggaccgtctgaaagcacggttttcgcgacgtatcatccggttgatgaattggaggagcacacgctgtctgttccgattggaaaaccggtcagcaatacggaagtatacattcttgacagtacgggacacgtgcagcctgccgggattgccggagagctttgcgtcagtggcgaaggactcgtgaaaggctattacaaccgtccagaactgactgaggagaaatttgttccccatccgtttacatccggcgaacgcatgtataaaacgggagaccttgctagatggctgccgaatggcgacatcgaatttatcgggcgaatcgaccatcaggtgaagattcgcggacagcgcatcgaacttggagaaatcgaacatcagctgcaaacccatgatcgtgttcaggaaagtgttgtgcttgccgttgatcaaggagcgggagataaactgttgtgtgcttattatgtcggagagggagacatctcatcacaagagatgagagagcatgctgcgaaggacttgccggcatatatggttcctgcggtgtttatccaaatggacgagctgccgctgacagggaacggaaaaattgaccggagagcgctgccgattcctgatgccaacgtttcaagaggtgtttcatatgttgcgccacgcaatggaacggaacaaaaagtcgcagacatttgggcacatgtgcttcaggcagaacaagtcggcgtttatgaccacttctttgacattggcggacattcattagcaggcatgaagatgcttgccttggttcatcaggaactgggcgttgagctgtcactcaaggatctcttccagtcaccgacggttgagggcttggcacaggtgattgcctctgctgaaaaagggacagccgcaagtatcagcccggcagagaaacaagatacgtatcctgtttcttcaccgcaaaaacggatgtacgtgcttcagcagcttgaggatgcgcaaacgagctataacatgccggcggttctgcgcctgacaggtgagcttgatgttgaaaggcttaacagcgtcatgcagcagttaatgcagcgtcatgaagccttgagaaccacgtttgaaataaaagatggagaaacggtgcagcggatctgggaagaggctgagtgtgagatagcctatttcgaagccccggaagaagagacagagcggatcgtttctgagtttattaagcctttcaaaatcgaccaacttccactgttcagaatagggcttatcaagcattcagacactgagcatgtgctgctgttcgatatgcatcatattatttctgatggtgcatctgtcggtgtgctgattgaggagctttcaaagctgtacgacggagaaacccttgagccgctccgtattcaatataaggattatgctgtgtggcagcagcagttcattcagtctgagctttacaagaagcaagaagagcattggctgaaggagctggacggagagctgccggtgctgacgcttccgaccgattacagtcggcctgccgttcaaacatttgagggagaccgcattgcattttcattagaagcaggcaaagctgatgctctgcgcaggcttgcaaaagaaacggattccacgctttacatggtgcttctggcttcatacagtgcatttttatcaaaacttagcgggcaagacgatatcatcgtcggttcacctgtggccggacgatctcaagcggacgtcagccgcgtcatcggaatgttcgtcaatacattggcgctgcgcacgtatccgaagggtgaaaagacgtttgctgactatcttaacgaagtgaaagaaacggcactcagcgcttttgatgcgcaggattacccacttgaggatttgatcggaaatgttcaggttcagcgtgacacaagcagaaatccgttattcgatgcagttttttcaatgcaaaatgcgaatataaaggatttaacaatgaaagggattcagcttgagccgcatccgtttgaacggaaaacagccaagtttgacctcacgctgacggctgacgaaaccgacggagagcttacattcgtactcgaatacaatacagctctgtttaagcaggaaacgattgaacgatggaagcaatattggatggagcttttagatgatgttactgggaacccgaaccagctgctttccagcctgtcactggtcaccgagacagaaaagcaagcgcttcttgaggcatggaagggcaaagcgctgcctgtgccgacagacaaaacggttcatcagctattcgaagagactgtccagcgccacaaagaccgcccggctgtcacatacaacggccagtcttggacgtacggcgagctgaatgcgaaggcgaaccgtctcgcgcggattctgatggactgcggcattagcccggatgaccgcgtcggcattctcacgaagccgtcgcttgaaatgtccgccgcggtgctcggcgtcttgaaagccggagcggcgtttgtgccgattgatcctgactacccggatcagcggattgagtatattttacaggacagcggcgcgaagcttctcttgaaacaggaagggatttcagtgccggacagctttacgggagatgtcattcttctcgatggaagccgcacgattctaagcctgccgcttgatgaaaacgacgagggaaatccagaaaccgctgtaaccgcggagaacttggcgtacatgatttacacgtctggaacgaccggacagccgaagggtgtcatggtcgagcaccatgcgcttgtgaacctgtgcttctggcaccacgacgcgttcagcatgacagcggaggaccgcagtgcgaagtacgcgggctttgggttcgacgcttccatttgggagatgttcccgacctggacgatcggtgccgagcttcacgtcattgatgaagcgatccgcctcgatatcgtccgcctgaacgattattttgaaacgaacggcgtaacgatcacgttcctgccgacacagcttgcggaacagttcatggagcttgagaacacatcacttcgcgtattgctcattggaggagacaagctgaagcgcgcagtgaaaaagccgtacacactcgtcaacaactacgggccgacagagaatacggtcgttgccacaagcgcagaaatccatccggaggaaggctcgctttccatcggaagggccattgccaatacgagagtatacattctcggcgagggcaatcaggtgcagccggaaggcgtagccggagagctttgcgtggcggggcgcggactggcacgcggctatctgaatcgagaagacgaaaccgcgaagcggtttgtcgctgatccgtttgtgcctggtgagcgcatgtaccgcaccggcgatttggtgaaatggacgggcggcggcatcgaatacatcggccggatcgaccagcaggtcaaggtccgcggctaccggatcgagctctcagaaattgaagtccagctcgcacagctttctgaggtgcaggatgcggcggtgacagctgtcaaagataaaggaggcaacacagcgatcgcggcgtatgtcacaccggaaacagctgacatagaagcactgaaatcagcactaaaggaaaccctgccggattacatgatcccggcgttctgggtgacgctggacgagcttccggttacggcaaacggcaaagtggaccgtaaagccttgcctgagccggacatcgaagcgggaagcggagaatacaaagcgcctacgaccgacatggaagagctgcttgccggcatctggcaggacgtgcttggaatgtctgaagtcggtgtcaccgacaatttcttctcgcttggcggagattccatcaaaggaattcaaatggcgagccgcttgaaccagcacggctggaagctggaaatgaaagatctcttccagcacccgacgatcgaagagctcacccagtacgtagagcgtgccgaaggcaaacaggcagaccaaggcccggtagagggcgaagtcatcctgacgccgatccagcgctggttctttgaaaagaacttcacgaacaagcaccactggaaccaatcggtgatgcttcacgccgcgaagggctttgaccctgaacgggtggagaaaacattgcaggcgctgatcgagcatcatgacgcgctccgtatggtctatcgtgagggactggaagacgtcattcaatacaacagaggtcttgaagctgcttccgctcaattggaggtcatccagattgagggccaagctgcagattacgaagaccgtatagagagagaagcggagcgtttgcaaagcagcatcgacttgcaggaaggcggcttgttaaaagcaggattgttccaagcggaagacggagaccacttgcttcttgccattcaccacttagtggttgacggcgtgtcgtggcggattttactggaggatttcgccgcggtatatacacagcttgagcaaggcaatgaaccggttctcccgcagaaaacacattcatttgcagagtatgcagagagattgcaagacttcgcgaactccaaagcctttttgaaagaaaaagagtattggagacagctcgaagaacaagctgtcgcggcaaagcttccgaaagaccgcgaatctggtgatcagcgaatgaaacatacaaagacaattgaattctcgctgactgctgaagagacagaacagctcaccacaaaggtgcatgaggcatatcacacagaaatgaatgatattttgctgacggcattcggattggcaatgaaggagtggacgggtcaagatcgagtaagtgttcatttagaggggcatggacgtgaagaaatcatagaagacctgaccatttctcgcacagtcggctggtttacaagtatgtacccaatggtgctcgatatgaagcatgcggatgatctgggctaccagctgaagcaaatgaaagaagatatcagacatgtgccgaataagggagtcggatacggcattctgcgctatctgacggcacccgaacataaagaagatgtggcgttctcgattcagccggatgtcagcttcaactatttaggtcagtttgacgaaatgtcggatgcaggtttgtttacgagatcagagctgccatcaggacagtcattaagccctgaaacagaaaaaccgaatgcgctggatgttgtcggatatatcgaaaacggaaaactgacgatgtcactggcctatcattctcttgaatttcatgaaaaaacagtacaaacattcagtgacagctttaaagcgcatcttctcagaatcattgaacattgcctatctcaagacggtacggaactgaccccgagtgatcttggtgacgacgatttgacgctggatgagctggataaattaatggaaattttctaatagaggtggcatatgagcaaaaaatcgattcaaaaggtgtacgcactgacaccgatgcaggagggaatgctgtatcatgcgatgcttgatccgcattcttcctcgtacttcacacaattagagcttgggattcacggcgcttttgatcttgaaatctttgagaaaagcgtcaatgaactgattcggtcatacgatattctccgtacggtatttgtgcatcagcagctgcaaaaaccgcgtcaggtcgtgttagcggaacgcaaaacaaaggtgcattatgaggatatcagtcatgcagacgagaaccgccagaaagagcacattgagcgttacaaacaagacgttcagcgccaaggctttaacctggcaaaagacatattgttcaaggtagcggttttccgccttgatgcagatcagctgtatcttgtctggagcaatcatcatattatgatggacggctggagcatgggcgtcctcatgaaaagcctgttccaaaactatgaagcgctcagagcaggaaggacacctgcaaacggtcaaggcaagccttactccgactacatcaaatggcttggaaaacaggacaatgaagaagcggagagctactggagcgagcgcttggcgggttttgaacagcccagcgtgctcccgggccgcctgcctgtaaaaaaagacgaatacgtcaataaagaatattcctttacatgggacgaaacactggttgcccgcattcagaaaaccgcaaaccttcatcaagtgacagggcctaacctatttcaggccgtttgggggattgttctcagcaaatacaactttacggatgatgttgtcttcggaacggtcgtctcaggaaggccgtctgaaatcaatggaattgaaacgatggcggggctgtttatcaacaccattccagtgcgggtgaaagttgaacgagatgctgcattcgctgatattttcacagctgttcagcagcatgcagtagaggcagagcgttacgattacgtgccgctctatgagattcaaaaacgctcagctcttgatggcaatctcttaaaccatcttgtcgcgtttgaaaattatccgcttgatcaagagcttgaaaacggcagcatggaagaccgcctcgggttttcgattaaggtagaaagcgcatttgaacaaacgagcttcgatttcaacctgattgtgtatccgggcaaaacgtggaccgtcaaaattaaatataacggagccgcctttgattccgcttttatcgaacggacagcggagcaccttacccgcatgatggaagcagctgtcgatcagccggccgcttttgtgcgtgagtacgggcttgtgggagacgaagagcagcggcaaattgtcgaggtgtttaacagcacgaaagccgaactccctgcaggaatggctgttcaccaagtgtttgaagagcaagcgaaacggacgccggcgagcactgccgtcgtatatgaaggaaccgtgctgacgtaccgcgagctgaatgcagcggctaaccgtctggcgagaaagcttgtcgaacaaggccttcaaaaaggggaaacagcagcgattatgaacgatcgatcagtagaaaccgttgtcggcatgctggctgtgttaaaagcaggcgccgcatatgtgccgcttgatccagcgcttccgggggatcgtcttcgtttcatggcagaggacagctccgttcgaatggttttgaccggaaattcttatacagggcaggcacatcagctgcaggtgccggttcttacactggacataggcattgaagatggcgaagctgacaatctcaacctgccatccgccccgtctgatttggcgtacatcatgtacacatccggttcaacgggcaaaccgaaaggcgtcatgatcgaacataaaagcattctgcgcctcgtcaaaaatgccgggtacgttcctgttactgaagaggaccgcatggcgcaaacaggggcagtcagctttgatgccggaacgtttgaggtattcggcgcactgctgaatggcgcagcgctttatccggtcaaaaaagagacactgcttgatgcgaaacaatttgctgcattcctgcgtgagcaaagcatcacaactatgtggctgacatcacctttattcaaccagcttgctgcaaaggatgcgggtatgttcggcacactgcgccatttaatcatcggcggagatgcccttgtcccgcatattgtcagcaaagtaaaacaggcatcgccgtcgctttcattgtggaacggatacggcccgacagaaaacacgacgttttcaaccagttttctgatcgaccgcgagtatggcggctctatcccaatcgggaagccgatcggaaattccactgcctatattatggatgagcagcaatgcctgcagccaatcggcgcgcctggtgagctttgcgtaggcggaatcggtgtagcgcgtgggtatgtcaatctccctgagctgacggagaagcaatttctggaagacccgttcagaccgggtgagagaatttaccgcactggtgacttggcaagatggctgccggacggcaatatcgaatttttaggcagaatcgacaaccaagtgaaggtgcgcggcttccgaattgagcttggcgaaattgaaacaaaactgaacatggctgagcatgtgacagaagccgcggtgatcatccgcaagaacaaagcagacgaaaatgaaatttgcgcgtacttcacggcggatcgtgaagtggctgtgagtgagctgagaaaaacactgtctcagtctttgcctgactatatggtccctgcccacctgattcaaatggacagcctgccgctcacgccaaacgggaaaatcaacaaaaaggaactgcctgcaccgcaatcagaagccgtgcagccggaatacgcagcaccaaaaacagagagtgaaaagaaattagcggagatctgggaaggaatactcggcgtcaaagcaggcgttaccgataacttctttatgatcggcggccattctttgaaagcgatgatgatgacggcgaaaattcaagagcattttcataaggaagttccgataaaagtgctttttgaaaagccgactattcaagaactggcactgtatttggaagagaacgaaagcaaggaggagcagacgtttgaaccgatcaggcaagcatcttatcagcagcattatcctgtatccccggcccagcggagaatgtatatcctcaatcagcttggacaagcaaacacaagctacaacgtccccgctgtacttctgctggagggagaagtagataaagaccggcttgaaaacgcgattcagcaattaatcaaccggcacgaaatcctccgtacatcgtttgacatgatcgacggagaggttgtgcaaaccgttcataaaaacatatcgttccagctggaggctgccaagggacgggaagaagacgcggaagagataatcaaagcatttgttcagccgtttgaattaaactgcgcgccgctcgtccgttcgaagcttgtccagctggaagaaaaacgccacctactgctcattgatatgcatcatattattactgacggcagttcaacaggcattctaatcggtgatcttgccaaaatatatcaaggcgctgatctggaactgctacaaattcactataaagattacgcagtttggcacaaagaacaaactaattatcaaaaagatgaggaatactggctcgatgtctttaaaggcgaactgccaatactggatcttcccgcggatttcgagcggccagctgaacggagctttgcgggagagcgcgtgatgtttgggcttgataagcaaatcacggctcaaatcaaatcgctcatggcagaaacagatacgacgatgtacatgtttttgctggcggcgttcaatgtactcctttccaagtacgcgtcacaggatgatatcattgttggctcgccgacagctggcagaacacatcctgatctgcaaggtgtgccgggtatgtttgtcaacacggtggcactcagaacggcaccagcgggagataaaaccttcgcgcaattccttgaagaggtcaaaacagccagccttcaagcattcgagcaccagagctatccgcttgaggagctgattgaaaagcttccgcttacaagggatacaagcagaagtccgctgttcagcgtgatgttcaacatgcagaatatggagattccttcattaagattaggagatttgaagatttcctcgtattccatgcttcatcatgttgcgaaatttgatctttccttggaagcggtcgagcgtgaagaggatatcggcctaagctttgactatgcgactgccttgtttaaggacgagacgatccgccgctggagccgccactttgtcaatatcatcaaagcggccgcggctaatccgaacgttcggctgtctgatgtagatctgctttcatctgcagaaacggctgctttgctagaagaaagacatatgactcaaattaccgaagcaacctttgcagctctttttgaaaaacaggcccagcaaacacctgaccaccctgcggtgaaggctggcggaaatctgctgacctatcgcgagcttgatgaacaggcgaaccagctagcgcatcatcttcgtgcccaaggggccggaaatgaagacattgtcgcgattgttatggaccggtcagctgaagtcatggtatccattctcggtgtcatgaaggcgggggcagctttccttccgattgatcctgatacacccgaagaacgaatccgttattcattagaggacagcggagcaaaatttgcggtcgtgaatgaaagaaacatgacggctattgggcaatatgaagggacaatcgtcagccttgatgacggtaaatggagaaatgaaagcaaggagcgcccatcatccatttccgggtctcgcaatcttgcatacgtcatttatacgtccggtacgaccggaaagccaaagggcgtgcagattgagcatcgcaatctgacaaactatgtctcttggtttagtgaagaggcgagcctgacggaaaatgataagactgtattgctttcatcttacgcatttgaccttggctatacgagcatgttccccgtacttctgggcgggggcgagctccatatcgtccagaaggaaacctatacggcgccggatgaaatagcgcactatatcaaggagcatgggatcacttatatcaaactgacaccgtctctcttccatacaatagtgaacaccgccagttttgcaaaagatgcgaaatttgaatccttgcgcttgatcgtcttgggaggagaaaaaatcatcccgactgatgttctcgccttccgtaagatgtatggacataccgaatttatcaatcactacggcccgacagaagcaacgatcggcgccatcgccgggcgggttgatctgtctgagccggatgcatttgcgaaacgcccgacaatcggacgcccgattgcgaatgccggcgcgcttgtcttaaatgaagcattgaagcttgtgccgccgggagcgagcggacagctctatatcacgggacaggggcttgcgagagggtatctcaacaggcctcagctgacagccgagagatttgtagaaaatccatattcgccgggaagcctcatgtacaaaaccggagatgtcgtacgaagactttctgacggtacgcttgcatttatcggccgggctgatgatcaggtgaaaatccgcggctaccgcattgagccgaaagaaattgaaacggtcatgctcagcctcagcggaattcaagaagcggttgtactagcggtttccgagggcggtcttcaagagctttgcgcgtattatacgtcggatcaagctattgaaaaagcagagctccggaagcagctttccctaacactgccgtctcatatgattcctgctttctttgtgcaggttgacgcgattccgctgacggcaaacggaaaaaccgacagaaacgctttgccaaagccgaacgcggcacaatccggtggcaaagccttggccgcaccggagacagcgcttgaagaaagcttatgccgcatttggcagaaaacgcttggcatagaagccatcggcattgacgacaattttttcgatttaggcggccattcattaaaagggatgatgctgattgccaacattcaggcggaattggagaaaagcgtaccgcttaaagcactgttcgagcagccgactgttcgccagctggcggcttatatggaggcgtctgctgtttcaggcggccatcaagtcctcaaaccggctgacaagcaggatatgtatccattgtcatccgcacagaaacggatgtacgtgctcaatcagcttgaccgccagacgataagctacaacatgccatctgttcttctaatggaaggagagcttgatatttcgtgcctgcgcgattcactcaatcagcttgtgaaccgtcacgaatcattgcggacgtcatttatggaagctaatggtgagcctgttcagcgcatcattgagaaggcggaggttgatcttcatgtgtttgaagccaaagaagacgaagcggaccaaaagattaaggaatttatccggccattcgacttaaacgacgcaccgctcattcgcgcagctttgcttcgaatagaagcgaaaaaacatttgctgcttttagatatgcatcatatcatcgcagacggcgtctcaagaggcatttttgtaaaagaattggcgctgctttacaaaggagagcagcttccggagccggcgcttcattataaagatttcgccgtttggcaacatgaagctgagcaaaaagaacggatgaaggagcatgaggcgtactggatgtcagttctttcaggcgagctgccagagcttgatctcccgctcgattacgcccgtccgcctgtgcaaagctttaaaggagatacgatccgtttccgtacgggaagtgagacggcaaaggcggtagaaaaactgcttgcggaaaccggaacgaccttgcacatggtgctccatgctgttttccacgtctttttaagcaaaatttccggacagcgggatatcgtcatcggctccgttactgccggccggacgaatgctgatgttcaggacatgccgggaatgttcgtcaatacacttgccctgagaatggaagcgaaagaacagcaaacatttgcggagcttttggagcaagcaaagcagacgaacctgtcagcgcttgagcatcaggagtatccgtttgaagatctggttaatcagcttgatctccctcgggatatgagccgaaacccattgtttaatgtgatggtgacgacagaaaaccctgataaagaacagcttacattgcaaaatctgagcatttcaccttatgaggctcatcagggaacttctaagtttgatctgacactgggcggatttactgatgaaaatggcattggcttgcagctcgaatatgcgacagatctgttcgcgaaagaaacagctgaaaaatggagcgaatacgttctgcggctactaaaggctgttgcggataacccgaaccagccgctttccagcctgtcactggtcaccgagacagaaaaacaagcacttcttgaggcatggaagggcaaagcgctgcctgtgccgacagacaaaacggttcatcagctattcgaagagactgtccagcgccacaaagaccgcccggctgtcacatacaacggccagtcttggacgtacggtgagctgaatgcgaaggcgaatcgtctcgcgcggattctgatggactgcggcatcagcccggatgaccgcgtcggcattctcacgaagccgtcgcttgaaatgtccgccgcggtgctcggcgtcttgaaagccggagcggcgtttgtgccgattgatcctgactacccggatcagcggattgagtatattttacaggacagcggcgcgaagcttctcttgaaacaggaaggcatttcagtgccggacagctttacgggagatgtcattcttctcgacggaagccgcacgattctaagcctgccgcttgatgaaaacgacgagggaaatccagaaaccgctgtaaccgcggagaacttggcgtacatgatttacacgtctggaacgaccggacagccgaagggtgtcatggttgagcaccatgcgcttgtgaacctgtgcttctggcaccacgacgcgttcagcatgacagcggaggaccgcagtgcgaagtacgcgggctttgggttcgacgcttccatttgggagatgttcccgacttggacgatcggcgctgagcttcacgtcattgatgaagcgatccgcctcgatatcgtccgcctgaacgattattttgaaacgaacggcgtaacgatcacgttcctgccgacacagcttgcggaacagttcatggagcttgagaacacatcacttcgcgtcctcttgaccggaggagacaagctgaagcgcgcagtgaaaaagccgtacacactcgtcaataactacgggccgacagaaaatacggtcgttgccacaagcgcagaaatccatccggaggaaggctcgctttccatcggaagggccattgccaatacgagagtatacattctcggcgagggcaatcaggtgcagccggaaggcgtagccggagagctttgcgtggcggggcgcggactggcacgaggctatctgaatcgagaagacgaaaccgcgaagcggtttgtcgctgatccgtttgtgccgggtgagcgcatgtaccgcaccggcgatttggtgaaatggacgggcagcggcatcgaatacatcggccggatcgaccagcaggtcaaggtccgcggctaccggatcgagctttcagaaattgaagtccagctcgcccagctttctgaggtgcaggatgcggcggtgacagctgtcaaggataaaggcggcaatacagcaatcgcggcgtatgtcacaccggaaacagctgacatagaagcactaaaatcagcactaaaggaaaccctgccggattacatgatcccggcgttctgggtgacgctgaacgagcttccggttacggcaaacggcaaagtggaccgcaaagccttgcctgagccggacatcgaagcgggaagcggagaatacaaagcgccgacgaccgacatggaagagctgcttgccggcatctggcaggacgtgcttggaatgtctgaagtcggtgtcaccgacaatttcttctcgcttggcggagattccatcaaaggaattcaaatggcgagccgcttgaatcagcacggctggaggctggaaatgaaagatctcttccagcatccgacgatcgaagagcttacccaatatgtagagcgtgccgaaggcaaacaggcagaccaaggcccggtagagggcgaagtcatcctgacgccgatccagcgctggttctttgaaaagaacttcacgaacaagcaccactggaaccaatcggtgatgcttcacgccgcgaagggctttgaccctgaacgggtggagaaaacattgcaggcgctgatcgagcatcatgacgcgctccgcatggtctaccgcgaggaaaacggggacatcgttcaggtgtataaaccgatcggtgagagcaaggtcagcttcgaaatcgtggatctgtacggctccgatgaagagatgctgagaagccagattaagcttctcgcgaacaagctgcaaagcagtctcgatctgcgaaacgggccgcttttaaaggcggagcaatatcgcacagaagctggggatcacctgctcattgctgtacaccatctcgtggtcgacggtgtgtcatggcggattttgcttgaagactttgcttcaggctacatgcaggctgagaaagaagagagccttgtcttcccgcaaaaaacaaactccttcaaggattgggcggaagaactggcggcattcagccaatcagcgcatcttttacagcaggctgaatactggtcgcaaattgccgctgaacaggtttctcctttaccaaaggattgtgaaacagagcagcggatcgtcaaggatacatcatccgtcctatgtgaattaacggaagaagacactaagcatcttttaacagatgttcatcagccatatggaactgaaatcaacgatattcttctcagcgcgctcggtttgacaatgaaagaatggacaaagggggccaaaattggcattaaccttgagggacacggccgggaggacatcatcccgaatgtgaatatctccagaacggtcggctggtttacggcacaataccctgttgtgctcgacatgtctgaagcagatgcctcagctgtgatcaaaacagtcaaagaaaacctgcgccgcattccggacaaaggtgttggctacggcattcttcgttatttcacagaaacagcggaaacaaagggcttcacaccggagatcagcttcaactatttgggccaattcgacagtgaagtcaaaaccgatttctttgaaccgtccgctttcgatatggggcgccaagtaagcggagaatcagaggcgctgtacgcattaagcttcagcggcatgatcagaaacggccggtttgtgctttcctgctcctacaatgagaaggagtttgaaagagctacagtcgaggagcaaatggaacggtttaaagaaaacctcctgatgctaatccgccattgcacggaaaaagaagacaaggaattcacaccaagcgacttcagcgccgaagaccttgaaatggacgagatgggagatatctttgacatgcttgaggagaatttaaaataaaacgcaagggaattacagaaggcgggagcgaaacatatgagtcaatttagcaaggatcaggttcaagatatgtattacctatcgccgatgcaggaagggatgctttttcatgccatcctgaatcccggccaaagcttttaccttgaacaaatcacgatgaaagtaaaaggtagcttgaatatcaaatgtcttgaagaaagcatgaatgtgatcatggaccggtacgatgtatttcgtaccgtgttcattcacgaaaaagtaaaaaggcctgtccaagtcgtattgaaaaaacggcagttccaaatagaagaaatcgatctgacacacttaacgggcagcgagcaaacagccaaaatcaatgagtacaaagaacaggataagatcaggggttttgatttgacgcgggatattccgatgcgggcagccattttcaagaaagctgaagaaagctttgaatgggtgtggagctaccaccacattattttggacggatggtgcttcggcatcgtcgtacaggatctatttaaggtatacaatgctctgcgcgaacaaaagccgtacagcctgcccccgtcaaaccgtataaagactacatcaagtggcttgaaaagcaggataaacaagcatcactgcgttactggcgcgagtatttagaggactttgaaggacaaacgacgtttgcggagcaaagaaagaaacaaaaggacggctatgagccgaaagagctgctcttttcactgccggaggcggaaacaaaggcctttaccgagcttgcaaaatcgcagcataccactttaagtacggcgctgcaggcagtctggagcgtattgatcagccgctatcagcagtctggcgatttggccttcggtacagttgtttcagggcgtcccgcggaaatcaaaggcgttgaacatatggtcgggctgtttatcaacgttgtcccgagacgtgtgaagctgtctgagggtatcacatttaacggcttgctcaagcagctgcaggagcaatcgctgcagtctgagccgcaccaatatgtgccgctttatgacatccaaagccaggccgatcagccgaaactgattgaccacatcattgtttttgagaactatccgcttcaggatgcgaaaaatgaagaaagcagtgaaaacggctttgatatggtggatgttcatgtttttgagaagtcgaattatgatctcaacctgatggcttcccctggagatgagatgctgattaagcttgcctataatgagaatgtgtttgatgaggcgtttatcctgcgcttgaaatctcagcttctcacagcaattcagcagctcatccagaatcctgatcagcctgtcagcacgatcaacctcgttgacgacagggagagagaatttttgctaaccggcttaaacccgccggctcaagctcatgaaacaaagcctctgacggattggttcaaggaagcagtgaacgtcaatccggatgcgccggcgcttacgtattccggccagaccctgtcttatcgcgaattagatgaggaagcgaaccgccttgcacgccggctgcaaaaacacggtgcgggcaaaggctctgttgtagcgctgtacacgaagcgctcacttgaactggtaatcggcattctcggtgtattaaaggcgggagcagcctatctgccggttgatccgaagctgccagaggaccgaatctcgtatatgctggctgacagtgcggcagcctgtcttctgacgcatcagaagatgaaagaacaagcggctgagctgccgtatacaggcacaacgctcttcattgatgatcaaacacggtttgaagaacaggcaagcgatcctgcaaccgcgattgatcctaatgatccggcatatatcatgtacacgtccggcacaaccggaaagccaaagggcaatatcaccactcatgccaatattcaaggattggtcaagcatgtagactacatggcattctctgagaaagatacattcttatctgtttccaattacgcctttgacgcatttacctttgatttctatgcttctatgctgaatgcggcacggctcattatcgcagatgaacatacgctgcttgatacagaacggctcacagatctgatcctgcaagagaatgtcaatgtcatgtttgcgacaaccgcactatttaatcttctcacggatgcgggagaggattggatgaagggactacgctgtatattattcggcggagagcgcgcgtcagtgcctcatgtcagaaaagcgctgcgggtcatggggccgggcaagctgattaactgctacgggccgactgagggaacagtgtttgcgactgctcacgtcgtgcatgatataccggattccatctcctcattgccgatcggaaagccgatcagcaatgccagtgtttatattctgaacgagcaaagccagctccagccattcggggcgatcggtgaactgtgcatcagcggaatgggcgtgtcaaaaggatatgtaaatcgtgctgacctcacgaaggaaaagtttattaagaacccgttcaagccgggagaaacgctttaccgcacaggggatttagcgcgctggctgccggatggaacgattgaatacgccggccgtattgacgaccaggtcaaaatacgtggacaccggattgagcttgaagaaatcgaaaagcagctgcaggaatacccaggtgtgaaagatgcggtcgttgtggcggaccgccctgagtctggcgatgcatcaatcaatgcctaccttgtgaaccgaacgcagctttcagctgaagacgtgaaggcgcacctgaaaaaacagcttcctgcttacatggtgccgcaaacctttaccttcttggatgagcttcctttaacgacgaacgggaaagtcaataaacggctgctcccaaaacctgatcaggatcagctggcggaagaatggattggaccgcggaacgagatggaagaaacaatcgcacaaatatggtctgaggttctcggcagaaagcaaattggcattcatgacgatttctttgcgctcggagggcattccttgaaggccatgaccgccgcgtcccgcatcaagaaagagctcgggattgatcttccagtaaagcttttgtttgaagcgccgacgatcgccggcatttcagcgtatttgaaaaacgggggccctgatggcttgcaggatgtaacgataatgaatcaggatcaggagcagatcattttcgcattcccgccggtcttgggctatggccttatgtaccaaaatctgtccagccgcttgccgtcatacaagctgtgcgcctttgattttattgaggaggaagaccggcttgaccgctatgcggatttgatccagaagctgcagccggaagggcctttaacattgtttgggtattcagcgggatgcagcctggcgtttgaagctgcgaaaaagcttgaggaacaaggccgtattgttcagcggatcatcatggtcgattcctataaaaaacaaggtgtcagtgatctggacggacgcacggttgaaagtgatgtcgaagcgttgatgaatgtcaatcgggacaatgaagcgctcaacagcgaagccgtcaaacaaggcctcaagcaaaaaacacatgccttttactcatactacgtcaatctgatcagcacaggccaggtgaaagcagatattgatctgctgacttccggcgctgattttgacatgccggaatggcttgcatcatgggaagaagctacaacaggtgcttaccgtatgaaaagaggcttcggaacacacgcagaaatgctgcagggcgaaacgctagataggaatgccgggattttgctcgaatttcttaatacacaaaccgtaacggtttcataaatgaagtgatgaaaggaggagacagccaatgagccaactcttcaaatcatttgatgcgtcggaaaaaacacagctcatctgttttccgtttgccggcggctattcggcgtcgtttcgccctctccatgcttttttgcagggggagtgcgagatgctcgctgccgagccgccgggacacggcacgaatcaaacgtcagccattgaggatctcgaagagctgacggatttgtacaagcaagaactgaaccttcgccctgatcggccgtttgtgctgttcggacacagtatgggcggaatgatcaccttcaggctggcacaaaagcttgagcgtgaaggcatctttccgcaggcggttatcatttctgcaatccagccgcctcatattcagcggaagaaagtgtcccacctgcctgatgatcagtttctcgatcatattatccaattaggcggaatgcccgcagagcttgttgaaaataaggaggtcatgtcctttttcctgccttctttccgatcagattaccgggctcttgaacaatttgagctttacgatctggcccagattcagtcgcctgttcatgtctttaacgggcttgatgataaaaaatgcatacgagatgcggaaggctggaagaagtgggcaaaagacatcacattccatcaatttgacggcgggcacatgttcctgctgtcacaaacggaagaagtcgcagaacggatttttgcgatcttgaatcagcatccgatcattcaaccgtgatcaaaagcggacagcttcggctgttccgctttttttgtgttgaatgccaatttttgcatggtataatagtcgaaatactcaaataaaggcaggtcgaaacatgcgcacgtctcccaggatgaaatggtttgtattgctgtttacgtttgttttcgccatcggaatgaactcattcagaaattcctttcaattttttatgctgccaatggcagatgccttccatgccgacaggtcgctgatctcggtttctgtcagcatttttatgatcacaaccggcatcgtccagttttttgtcggtttttttatcgaccgtttcagtgtcagaaaaattatggcgctgggagctgtctgcatcagcgcaagctttttggtgcttccttattcaccgaatgttcatgtgttttccgccatttacggtgtgcttggcggaatcggctattcctgcgcggtcggcgtgacgacccagtacttcatcagccgttggtttgacacacataaaggtctggcgcttgctattttgaccaatgccaactctgcgggcctgctgcttctctcgcccatttgggctgcggctccgtatcatgccggctggcagagcacctataccattttgggaatcgtcatggcggctgttctgctgccgctcctcgtctttgggatgaagcacccgccacatgcgcaagcggaaactgtgaaaaaatcttatgattggcgagggttttggaacgtgatgaagcaatcccgcctcattcatatcctgtacttcggcgtgtttacttgcggatttacaatgggaattattgatgctcacctcgtcccgatactgaaggatgcgcatgtctctcatgtcaacggaatgatggccgcgttcggggcatttatcatcattggcggattattggcgggctggctgtcagatctcctcggcagcagaagcgtcatgctatccatcttatttttcattcggctgctcagcctcatttgcctgctcattcccattctcggaattcatcacagcgacctttggtacttcgggtttatcctgttattcgggctcagttacacaggcgtgatcccgctgaccgcggcgtcaatttcggaaagctatcaaacaggattgatcggatcgctgttaggcatcaatttctttatccatcaggttgccggagctcttagcgtgtatgcgggcggtttgttttttgacatgactcatggttatttgctgattgtcgctgtgtgcatcgtgtttgtgggtttatcggctgtaatagagctggtgccgtttttagataaacagaaggcaaaagaaacccaccattcaatataaaaggatcagcactgtcaatgctgatcctttttaaatttgagtttttttgtttcggtatttttaaggataatctccttgaatctgttcatctcctcttcggagtgaaaaaaatgtttggggatcgcaatatattggccacttgatgtattgaccctgaagatatttttatattcgaaaacagctgtaatttcatcccaattgaaaatgaggtcatattttttagaacatatacgaattccttcttggttcagagtatatgttcttttagatttcatccgttcgttcttcttgtatgctctggaaaacttcacatatagaagaaggaggagcagcagtgtaaacagaacggacatcacgataatcaacatactgttcataaacaagttaagcgcgtcactgccataaacgatacggggccatccgttaatgaagttaactgcagcaaatatggtgcaaaacaacagaaagtaaaagcatgatatttttgcgatttgataaaaaaagatttctcttacatccttaaaagcgatttctcctggaagattgatactttcactagcatattgaatcatacggtaaacctacacctctaaccatgtttttcctttcagtctagcataatttctcatttttttgcaggcataccagggcgctttgtttttttctccagattgatattgctccccaccacgccaatcataatacaaacagccccggcaagatgataccaggccaggctttcgttgagaatcataactcctgcaatcatcgtcacaatggtagatacatgattaaaagcactcattttaaacgcctcaattcgcgacagcgtatagttagacagaaatgaagtgacaagtgaagacagcacgcccaaatacacaatggcgagaacgaagccgggctcccggaacggcagaaaataagtgccgactgttcccgccgctccgtgacgcacaagggcgatggcgttgaagacgacaaagccgatggctgacatgatgtaggtgagctcggtcagcttgaaccgctgcgtcatttttctggcagcagtattgtacatcgctgaggacaaagcggacaataggatcagcaaagacccttttaagctggctgattccacgtcaacgcctttcatcacaaaaataaacatgacgccggcaacggataaaaccgtgaaccccttttgggtccacgttgggcgttcctttaaaacataagcggcaaagaccatcgtgaaaatcggaatggctgcctgaataattcccgcttcagaggaggacgagtacacaaggccaaatgcctgaaagctgaaaaataacgcgggatacagcagggcgagcggcaaaatggcaatgacgtcctttacgcggattgatagctttacccagccgaataagatcggtacagtggccgcagcaaacgcaatggtgaaccgatgcgccaaaatatcaaacggctctgctgtttgcagtgcgatttttacgaatagaaaggataaaccgataatgaacgaatataaaatagccgctatataagcgggggcttgctgatgtttaaccataatgggaatggctcctttacctgaattgcagcgccggtcgctccctttattgtatggccgcggtcagaacggtacaatgagaaaaacaatgaactgtaccggtacaaaacagggggagaaggcatggagaaatatatgagtctattaacgaagatagaggagatgatgcaaagcaccgcctatcaagaaggagacaggcttccatctatccgtcagctgtccgcccgctaccaagtcagcaaaagcacagtgatccgcgcgctgcaggagctggaaaaacgccaccttatctattccgttccgaaaagcggctattatattgtgaaaaagacgggaaaagccaaaagcgggcagcagggtcccattgactttgccacatctgcgccggatccagatgtgtttccgtatcttgattttcagcactgcatcaacaaagcgattgatacatacaaaaacgatttgtttatttatgggacgccaaaggggcttccatcactcatccgcgtactccgaaagctcttggccactcaacaggtatttgcggatgaacggcatattttcattacatcaggtgtccagcaggcgttatccttgctttgtgccatgccgttcccaaatgggaaagagaagatcgccattgaacagccgggctaccatttgatggtcgaacagcttgagacgcttgggattcccgccatcggggtgaaacgaacggaagaagggcttgatatagccgaggttgagcggttatttcaaacagaatcgattaaatttttttatacgatgccccgcttccataacccgcttggctgctctttgtcagagcgtgataaacaggagcttgtgagactggcagaagcgtatgatgtctacctcgttgaggatgattacctcggtgatctggaggaaaataaaaaggcagatccgctgtacgcatatgatctgtcctcacatgtcatctatttgaaaagcttctcgaaaatgatgttccccggccttcgcgtgggggcggctgttttgcccgaagcgctgactgacacgttctatgcgtacaaaaagctgaacgacatcgactgttcgatgatttctcaagcggcattggagatttacctgaaaagcggtatgtacggcaggcataaggagaaaatcagaaattcttataaagagcggtcgctgaggctacatcaagccattcaaacacacaggcagctgggaagcggacgctttacgttctccagcgggcaggcaccctgtatgcacacccatctggtgcttcctcaggatctgcccgcctcaagagtgattcatagactggaaaaacaaggggttctccttgtggcgatagaccgtcattatttatcagattatccgaaagaaaatctattaaaaatcaatatttccaatgtgaaaacggaagatattgagcgcggtgtcaagctgttgatgagccatttataaaagctcttcgtacgagaccattgtgatatcctcggggaaatcagggtgtgcggcgcatacagccattttgtagccgggatcgacctcatacgttttgatatagcatggggaatggctgtccggaagctcaatggatacttgtccgtcctggtgcaggcgcactgaaaaggaatcaagcggaagcgataagcctttgccttcctgtttgataaagctttctttcattgaccatagatgataaaaatagtctgtctgctcgtccttgtcttttgctaaaaggtcgctgtactctgtttttgaaaagaagcgcttggcgatctcaaggctgatcggtttcgttttttcgatatctatgccgatcggctgtgaatcaaacgcgcaaatgacccagcgtccggagtgagaaatgttgaaatgagcgtcgggaagatcagggatgcacggcttcccgtattcctgcgtgctaaagcggatatcggatttgtccaactgatactgcctgcttatgactgagcgaacgagcacatctcccagcagggtgcggtgagcatcttctttatgataaaatctccggcatttctcccgtttttcaggtgctatgaaagacatgaaccgttcattttcttcctgtgaaagcgggcggtccatataaattccgtaaatcttcattctagatcctccgtctgcaaaagattgtcaaaaccatcctatcatacttccacaagactcatatagaggagaaaataaaaaaacaaagccaaggcggctttgttttagtggacaggcggagatgctttcacagcggctgtccgccttgccacagcataattcagcagctggattgactgcggcaatgaaaaacgcagaatgagcccggtgaggatggcggtcaaaatggtgccaaaaccgatcggcccacccatgccccatgccgcaaacaaaatggttaattccatgccgttccgcacccattgcacattccagccggttttttctgtaatcagcatcatcagtgaatcacgcggccccgcgccaaggcctgctgatacataaacaccgacgccgtaaccgatcagcaccacgccgagagagaagacgatgatcgagcctgtgtaggtcgagggggcaggcagaatgaaattgaaaaaatctataaatacaccaatgagcaccatattcaggagggccccaattttcggccaagctctcgtaaacaatgacgtgaatccgacgatgagcgctccaataatgatggaccactggccgacggtaagcccgaagtgctgaaacaggctgtaatgaaatgcatcccacggactaatgccgagtgcttttccttctatcgtcagggatacaccaaaagccaaaatgatcaaaccggcaaaataaaatgtccagcgcagaacaagttcttgcttcacgtgaggtcccttctttcgtaaaaatcagtcgattgtcattgtagcacatctgacagaagggcggaataggcgaaaggggctcaacaaaaaaacagggccgccgcaggcgccctgtttcagcgtgttggtaaacccttgcattcgttgtcaggcctgtgcttcggtgctcacgaatttaacattcgctgtgctccaatgctcgcccttcctagacttcaaaggttttcaatcacgctgaaaatcacaaaatcctaaaacgaatatcgttttaggattttgtcaataatctgaaacagggcgcgggcgccctgtttttcttattacagcgggttcaaaatccggttcaagaaccgctgtgtccgttcttcttttggtgcggagaaaatttgctccggcggtccttgctccacgataacgccgccgtcgatgaagatgacttcatccgcaacctcctgcgcgaacttgatttcgtgggtcacgacgaccatggtccagccttcattggccaagtccttgataaccttcagcacctctccgacaagctcgggatcaagcgctgaggtcggttcgtcaaacagcatgagctcaggctgaatcgccagtgcgcgggcgatgccgacgcgctgctgctgtccgccggaaagctggaacggatataaatccattttgtccttcaatccgactttatcaagaagctgaatcgcttcttttctgacttcctctttgttccgtttttgcacctgaacagggccctccatcacgttttcgagggctgtgcggtgcgggaacaggtgatacgcctgaaacaccattccggattttcggcgaagctttaggatatccgcctgtttcacctttttggagaaatcgatggagaaatcatcaaatgcaagctctccgcgattcgggatctccagagcgttcaggcagcggagcagcgtcgttttccctgaacctgaaggcccaagtatggcgatgacttttcctttttcaatcttcatatctatcttttttaaaatttcattttcaccgaatgatttgtttaatcctttaacggtaagcatactcggaacctccttatttggccacgtagcggtcaagacgccgttcgatgacatgctggacgagtgagagcaggaagcagataatccaataaataaaggctgcttcaatatagatcactaaaatttgatcaagattccgcgcgccgatttcctgggcttttctgaacagctcagcgaccagaatttgagaggcgagggatgtatctttaatcaggctgataaaggtattggataatggcgggatcgacacacgaaacgcctgcggcaaaatgacgcggaacagcgttttttgatgtgtcatgccaattgtgtagccggcttcccattgccctttcggcacggataaaatagatgctcgaatgatttcagatgcataggcgccgacgtttaatgaaaaggcgataactgcgcttggaaatggatctaatgtgacgttaaaggccgggaacagatagaaaatgatgaacaattgaacgagaagaggagtgccgcgtattgcggatacgtatacgctgaacacccatctcaaaggtctcactttcgacattctggcaagcgccgtaatcagcgccaggatcattccgaatataaaggaaagaatcgtaaggggaatcgtatagtagattccccctgaaagtatcggccagaatgactgctgcaccagatcccacgggatcgccgtgccaagcgtcaatgccggcagattatttagaaacatcttcgccgaaccattttttagaaattttagaaagagtcccgtcctctttcatttcttttaatgctttgttgacttgatcaacaacctcgccgcttcctttacggaacgtgaaatatgttgactgaggctcacctgtttcaaacgcgattttcacgtttttattgccagatgtttttaagtagttcaatacggcaagcttatcgttgtatgtcatatcgacgcggccttgctggatcatttgaagggcctgcgccataccttcaacgccttctactttagcgccggcatttgtagctaatttgttgtagttgcttgtcagtgattgagctgacgtttttccttttacatctgcttcagacttaatatcgttgttgtcttttttcgttacgacaacggctcttgatgttgtgtatttatctgagaaatcatattgattttcacgatctgtttttccgacttggttggcaacaacgtcaaaccgtttggaattcaggccggcaaacatactgtcccactgtgtttccttaaagtcgactttaagcccgaggcgttttgcgacttctgtgataacttcgacatcatagccagtcagtttatcagtgtctttgtcgtggtaagtgaacggctcatatgttccttccgttccgactgtgagcacaccttttttcttaattgaagcccaaagatcgccatctttggcattatcttttgactgattgtcatttcctgctccgcaagctgcaagagctgcaatacttacgaccatgaataaagccaataatgcttttttcatcttattccccacttttctggttgattttattgaaataaaaaaatagcttacaaatctaaaggataacttttttttagtatgagtcaagtaattggttttcataaggcaaaatcttttaaaataaatccaaaaattgctgtgccggtttaggcaaataactgtccgttctccacatgacagccggtgtcataatgaagggattattttcgatatgaacggtgcgaacgtgatttctcatatgaacgggaatcattgtgacgggcaaaatagacgcgccgaatccggatgacacgaggctgagcaaagttgcagagtcgtggcattcacaaacaatgcgcggctccaggttcaaacgatgaaattcattcatgacctgattataaacgccttttccgttgacaggccgcagcaggatcagcggaaatgaaggaatgtcctccatcttaatggtgtctccgcacggatatccggcttcatctgaaagcacgagcacacatggaatgtcatcaagctgtttgaattgtactgtgtcacttttgatcagtgttgtcgtgaccgccgcatcgatttgccggctttccagcagctccaacagtgtcgcgggttcattttcccaaatattaaaggtgagatgggggtatctctctttgatctgtgttactttttcaagcatcagagccgcgcaataaatcgttgatcccacggcaagtgtgccggctacttcctccttcagctcctgtacctcaatgactgcatcttcaaacctatgcagaatctcttttgctctttttagaaaaacagctccttcatatgtaagagtcatttgttttttcttgttacggtcaaacagaacaacaccaagttcgtcctccagctgtttgagctgcctgcttaaaggcggctgcgccatgtgaagctttttggctgcggacgtaattttctgttcttgggcaatggtaatgaagtatcgaagctggcgaatatccaaaagaaagcgcctccttatcataccttttaggtattaaatatagatttaatagatatttttcatatggatatatcaggagtatgattgaaatgaaagcagaattcaagcgtaaaggagggggcaaagtgaaactcgttgtcggaatgacaggggcaacaggggccattttcggggtcaggctgctacagtggctgaaggccgccggagtggaaacccatctcgttgtgtctccttgggcaaacgtcacgatcaaacacgaaacaggctataccttacaagaagtagaacaactggccacatacacttactcacataaggatcaggcggcagccatttcaagcgggtcgtttgataccgatggaatgattgttgcgccgtgcagcatgaagtctctcgcaagcattcgcaccggaatggcggataatctgctgacacgtgcggcggatgtcatgctcaaggagagaaaaaaactcgtcctcttaacgagagagacgcctttgaaccaaattcatctcgaaaatatgctagcgcttacgaaaatgggcaccatcattcttcctccgatgccggcattttataatcagccgagaagcttagaggaaatggttgaccatattgtttttagaacgttggaccaattcggcattcggcttcctgaagcgaagcgctggaatgggattgaaaaacaaaaaggaggagcttgatcatggcttatcaagatttcagagaatttctcgctgcccttgaaaaagaaggacagctgcttacagtgaatgaagaggtaaagccggaaccggatttaggggccgccgcacgggcagccagcaatcttggcgataaaagccctgcgctcttatttaacaacatttacggctatcataacgcgcgaattgcgatgaatgtcatcggctcttggccaaaccatgccatgatgctgggcatgccgaaagacacaccggtaaaagaacagttttttgaattcgcaaagcgttatgaccagtttccgatgccggtcaaacgtgaggaaacagcgccatttcatgaaaatgaaatcacagaagatatcaatttgttcgatatactgcctcttttcagaattaaccagggtgatggaggctactatttagacaaagcatgtgtcatttcccgtgatcttgaggaccctgacaacttcggcaaacaaaatgtcggcatttacagaatgcaggtcaaaggaaaagaccgtctcggcattcagcctgtcccgcagcacgatattgcaatccatctgcgccaagctgaagaacgcggcatcaatcttccggtcaccattgcgctcggctgtgagccggtcattacaacggcggcatcgactccgcttctctatgatcaatcagaatacgaaatggcaggcgcgattcaaggcgaaccatatcgcatcgtcaaatcaaagctgtctgatcttgatgttccgtggggcgctgaagtggtgcttgaaggtgagattattgccggagagcgcgaatatgaagggccgttcggtgaattcacaggccattattccggcggacgcagcatgccgattatcaaaattaaacgcgtctatcacagaaacaatccgatctttgaacatttatacttaggcatgccttggacagaatgcgattacatgatcggcattaacacatgcgtgccgctttatcagcagttaaaagaagcgtacccgaacgaaattgtggcagtgaacgccatgtacacacacggtttaatcgcgattgtttccacaaaaacccgctatggcgggtttgcgaaagcggtcggcatgcgcgcactcacaacgccgcacggactcggctactgcaaaatggtcattgtcgttgatgaggatgtcgatccattcaaccttccgcaggtcatgtgggcgctttcgaccaaaatgcatccgaaacacgatgcggtcatcattccggacttatctgtcctgccgcttgatccgggatccaatccatcaggaatcactcacaaaatgattcttgacgccactacaccggttgcgccggaaacaagaggccattattcacagccgcttgattcgccgctaacaacgaaagaatgggaacaaaaactaatggacttaatgaataaataaggaaaggatgttcgaaatgcatacatgtcctcgatgcgactcaaaaaagggagaagtcatgagcaaatcgcctgtagaaggcgcatgggaagtttatcagtgccaaacatgcttttttacatggagatcctgtgaaccggaaagcattacaaatcccgaaaaatacaatccagcgtttaaaattgatccaaaggaaacagaaacagcaattgaagttccggcggtgccggaacgaaaggcttgatccgcgtgaactgtatgtcagaccgcctctttgagctgcttgacgggagctgcctgaatgagaagcagcatgaggccttcgttctgcaaacagtatcagaggatggctggccgcatgccgctatgatcagtgcaggtgaaattatcgcgctgagccgaattgatatccgaatcgctctgtggaaaaacacaatgacttcggccaacatccttcgcacaggaaaagcacagttcacggcgtggtggaagggagcggcctattatgtaaagcttgaatgcgcgcctttaccgcctttgaatgatgctgaatatgatagagaccgtttttcctgccgcatcgtttcagtgaaggaggacgttgcgaaatacgctgatttgacttcaggtgtccgtatacagcttcacagccctgaagaggtgctgagcagatgggaaaagaccctggaagatttaaagcggtaatatcgatagcctgacgccatgcgtcaggctttttttatataatgaaaacaaaagggggcgtgagaaatggaacgtgcggggatcagtcactcggacggctttgatttagcttatcgaattgagggcgagggcgcacccatccttgtgatcgggagtgcggtttactatccgcgccttttttcctcagatatcaaacagaaatatcaatgggtctttgtcgaccataggggatttgctaagcctaagcgggagcttcgtgcggaggattcgaggcttgatgccgtcttggctgatatcgaaaggatgagaacatttcttcagcttgaggatgttactatcctgggacattccgggcacgcttttatggctttagagtatgccaggacatatcccaaacaagttcggaaggtggcgctctttaatactgcgcctgataacagtgaagaaagacagcgaaaaagcgaatcatttttcatggaaacagccagccttgagagaaagaaacgatttgaaaaagacatcgcgaatttgccgcaggacatcgacaaagatcctgaaaggcgcttcgtgcacatgtgtattcgcgctgaagcgaaaagcttttatcaagagcggccgcatgctgctgccttatgggacggtgtattcacgaatatgccgatcattgatgaattatggggcaatacatttgcccggattgatcttattcagcggttagctgatgttcgtatgccggtgtatattggattagggagatatgattatttggttgcgcccgttgcgctatgggatgcagttgacggtttatatccccatgtggataaggttatttttgaaaggagcggccatcagccgatgctggaagaaccggaagcctttgatcaaagcttcagcaaatggctggatcaataaaaaaacagcccgcagatcaaaatccgcgggctgtttctgattataagacccctttcatcgcgcgtttgataaccggcgagagcagcaggagaatgccgccaagaacgatagaaatcaaaccgatggtgccgaagtacattgtttcaggaattttatcaaacaatccggctacttgggcattgatcgcttgtgctgctgcgttcgtcagaaaccacatactcattgtctgtgcagagaaggcagctggtgccagtttcgttgtcacggataaaccgactggagacaggcacagctctccaagcacgacaagcaggaagctgagaacgagccaaagcgggcttacgagtgcttcttttccttgcatagcagggaataccataatgataaatgacaatccggctaaaataattccgattgagaatttaactggtgtagacggctggcgtttgccaagcttcatccagagccatgcgaatattggcgcaaaaatgacgacaaacaatggatttaatgattggaaccatgatgactgaagttcgaatccgcccaatgaaagtcttatgcgttcatcagcgtataccgcaagaatggtcgctccctgttcctgaatggcccagaacatgacagcaccgataaacaaaggaacgtaagcggcaagacgggatttttctgttttgtccgcttttttgcttgtaaacatgatgatgaaataaatcacaggaatcaaaataccgagaatacttacaaggtcgataaaacgattgatcgtcagcacgcctgtttgtacagagataatcactgcgatcgccacgatgataacaccgattccggtgccaatcgcagattttttagacagcggattcggcacattggaacctgcaagcccgaggtttttctttcttgtcaaagcaaaaacgataagtccgagaagcattccgaccgcggcagctccgaagccgagatgatagttgtacttctgtccgagtgttccgacaattaacggcgcaagtaaaccaccgaggttaatccccatgtagaaaatactgaaacctgagtcgcggcgcgggtcttctttcgtgtaaagatccccaaccacgcttgaaacgtttggttttaataagcctgttccgacaatgataagcaccatgctgatatagaatgcgatcgcgctgcccggataggcgagtgcaatgtggccgaacataatgaatatgccgccgtaaaacacggtgtttgcggtaccgaatacccggtcagcgagccatccgccaataatggtggacatgtatacgagtgatccgtaaatcgacataatggcaaccgcagtgcccttgtcaaagccgagccctccgtttaccgtctctgtatacaaatagtaaagtaagattgctctcattccatagtaagagaaacgctcccaaaattcggtgaaaaatagtgtaaatagtcctcgcgggtgaccaaagaaccctttttgcgggacgcttttaatgatactttcgttatcaatcgaagccatgtcagccaaaccctttctaaaaaaagtgtattataaaaatcatattcttatataatacttgtgtcaatataatttatactcatttcaaatagttccatattggaaaaattataaatacctaaaaatagtgatttcctcctaatttttaaactttttatcgtgagattttcttacacaactattcctttatatttttttaataaaattttagagaaatgtacaagcagatcgggcctttgtgagtaacatgatagtaatcatagagaaggaggctcgcaattggctgaattcatattaaatgcagcggatttcggtgttcctggagatggtaaaacggattcgacagaacggattaatcagtgcctcagtacagctgtatcgaaaggctatcatactgtctggtttccaaagggaacatatttaatagacgcaacgcttggcggagatcttaatcagaggtttcgaaacgcggggatcattgttcccggcaaccttgagattatgatggaccccgaatgtatcatgaaagtgatcccgaatagttcgtggggttattccgcattttatgtgggcaagcaagagaatataaccatttccgggggacaaattatcggcgaacgggatgagcatacgtatgcctcggcagggataaggtcaacccatgaatggggctttggcatatgtattgaaggatgctcgaatgttgtcattgatgatgtgaaaatttctgattttaccggcgatgggatcatagtcagcccaaggggattaaagaccaatcaagattatcgaacgtcagagcaaattatcatccgccgctgtgaggttcggcggtcgaggagaaataacatttccattaccggatgtgacatggtcacggtggaggaatgcttgattgaagatgccggaacggggaatggaacagcgccgaaattcggaattgacattgaaggatatggcgaaggtgatgttgattatgaggaaccgattaatgtatcaattcgcaataaccactttgttggaaacgtttcaagttctgtgaccaattttaacgggtatggcattttaatagaaggaaatcactctgacaatacaatcagctacggatatgggacgcaaacagtgatcaagggcaatattctgagacgccctgaagacgcggcggctgcgccaagagtcgggataaccggactcggtgtatcacaaggaaaagagaccagtgatgcagtgatcgctggcaacctcattaccggattttcaactggaattgatgtcagaggaaagagcgttcttgtgacgaacaacaaaatcagcaactttgaaaacacagggatattggtttatcagtcttccgatgtaaaggtagacggaaaccaaattcaaaacggactgtctgaaacaaggcgcagcatcggtcttcgcgcagtgctgtcagatgacatcgcttttctgaataactgtctcattcaagtcgttgacggtgtgaacgtttccggcggaaatatgatcattaaagataatctcctgagaaaattcagccggggcatttggattgctcaagggaacgcggtgattgaagggaatacactgaatcctgacgcgtttgaagcagtgccggaatcatattctgtttccgtcacaaacaatgccggcgccatcatcaaaaacaatacatttaaagagttcaaaaattaccccatttattgctccacaagtgcaaaaacctcaattatcggcaaccacttagagcgatccccgcttttggtcaccatctatatcagcgcaggtgtgcatgagatttttgataataccatttcagtcaacagaacagccgggaatccgattgtgatttatctcaatggctctgcaggctctatcatctctggaaacaccatcaataacctctccgcgggcactgcgacagctattcaaacaaacacgtcaaccaattccaaaatcatcggcaaccgcatttttaaagggaccatcaacaaacacagcagtgatacaatagacggcaatatgattgtctgaaaaaagcgcccccctttaggggttcttttttttcgatttatagatcacgtacatttctctcacaagtactaacacaaaaaataaaagcacgacccattccgcaaatgttgtcatcttaaagctggacatattgttataaacggcttttgttaaactgaacccttgaagcatgtccatcaacacagaaatagctaataaacaaattaatatgactccggtcacgcccaatatcttcatgcttcatcatcctccgcttttagtgtctatctttggcggagaagttataccgcatctaaccctaatgcataatctcaattttaaaaggaagaatatgagaaaacgacaaggaaaggtatttgtgtatgcctttattttctaagcgaaagaacaataccgattcaaaagacaagcagaatacagacgaaaggaatcaggaacagcagcaagaaaaagaaaggccggttctcatttctccaagtttggcaaagaatatagcggaaacgaaaaaggaagtcggaagcagctctgacgtcatcattcgcgagattaaaatcggggagcaggatcatgtccacctagctgttatctatattgctgggctggtcgataataacacgatccatgagtcgttaattgacccattggtacaggatgagtctatccagaatactcatgcgatccagcaaattcttgaaaaaacgctcccgctgggcggggtgaaagcggaaaagagctgggacaagcttttttccgagttaatgctcggcaatgcgctcatttttgctgatggccatgatgaagctttgatttgcagcactcaagggggagagcagcgctccatccaagagccgagcacccaggtgtcattccgcggcccgcgccaagggtttacagagtctctgcaaaccaatatttccatgatccggcgatacattaaaaatccgaatttatgggttgaaaaaatgaaaaaaggttctgttacgaatacggatatcgctctcatgtacattcaaggaatatgcgatgaaaaggtgctgaaagaagtgaagcagcgcctggaaaaaatagatattgacagtattttggaatctggatatattgagcagctgattgaagatgaaacctttacgacgtttccgactatgtatcatacagaacgccctgatgttgtagcgggtaatctgttagaaggaagattcgcgattattgtggacggaacaccgtttgtgcttattgccccggccttatttgtccagttttttcagtctgttgaggattattattcgcgttttgacattgcgacaagcataagaattcttcgtgttttagtctttttcatttcgcttgtggctccggctgtatacgtggcagccacgacgtttcatcaagaaatgataccgactcagctgttagtggtcattgcggcccagcgggaaattgtcccgtttccggctgttgtggaggcgctgacgatggaggttgcttttgagattctgagggaagcgggagtcaggctgccccgggttgtcggctcggcagtgtcaatcgttggcgcgctcgtaatcggccaggctgccgtacaggctggtatcgtctctccggcaatggtgattatcgtggcactcaccgcgattgcgagcttcgcaacaccggcgtttgcaatggcgatttcagcccggcttattcggtttatctttattattgcctcagctgttatgggtttttacgggctgattttagggatcattatgatgtttgtccacttatgcagtcttcgttcattcggcgttccatatatgtcgccgcttgcacccttttcttcacaaggcgtaaaggacgcgcttttccgggttccgtggtgggccgatgaaaaaaggccggaatcggtcagcaaggaagataaggtgcggcaggggcaagatcaacgcccagagccggccgcttcacgaggaatggtgaacaaagatttggaagaaggggatcagaatggtacgtaaatgtctattagccgttctcatgcttttgagcgtcattgtgctgcccggctgctgggataagcgggagctgacggatcttgcgattatctcggcgattggcatcgatcggacaaacgacagcaactacgtgctgcatcttcaaattatcaatccaggaaatgttgccggcggccttcagggaggcggtgctggagacaggccgcctgtatctgtctattcaattgaaggcgacaatttgacggaagcactcagaaaagcctccatgaaggtatcgcggcggctttattttgcccataccaacctggtcgtaatcagcgaaaagctggcgaaagaggaagggctggattttgtattagacaatcttgaccgggacacggaattcaggacaacggcgaccttcgtcgttgcccataaaacaaaagcagaaaatatcgtgaaaatcctgacgcctattgataaaattccgtcaaacaaagtcaataaaaccctcgatttcacggaggcgcaatacggtcgggtggtcaaaaccaatattcaggacgttttgaaaacacttgccagcgacacaagggcaccgattattccgggttatttgatgattggcgatgataaaaaaggagtcagcatggaaaacacgcaggcaactgacccgaaagccattcttcaggcagacggattggcgatttttgacaaggctgggtatttaaagtattggattgaagatgatgaaagcgtgggggcagtctggcttatgaataaggtccagcatacgtttattaatgctgattggggcaagacgaaggatgcggtcagcttgcaggttacccatcaagatacaaagctggtacctgatatgcggaacggacgtccgcacatccatgtgaaagtgacggttgaaggaattatagatgctgtcaaataccctttccaattgtctaatccgaaggtgctggccgctattgaaaaagcgctcaacaaagagcttgaaaaggaaatcagccatactgtgaaaaagatcaagaagaataagatagattttgtcggttttggtgacacgatatatagaaagtatccggagcagtgggagaaaatgaaggacacttgggacaaagaatatttgccggaactgcccatcgatgtgaaggccgagacgtatatcagaaggacgggattgcgaaacaatccgatcaaacaccagtttaaagatgattaggtctgaagaaaggggaagtgacagatggaaaaagccagaataagcataaggcagctgtttgtcatgattatcatttttgaactgggcagctccttattgattacaccgggatcaatggcgggcagggatgcttggatcgcagttctgttggggtgtgcggccggtttgtttcttttctatttgtatcaaggaatttatcaatgttaccccaattcttctccgaaagaatatatggatgatatgctgggaaccaagctgagctggctgttttcatttctctatatcttgtactttgcctatattgccgcaagggtcctgcgtgactttggagaaatgctgctgacatttgcttatcatgatacacctatcattattgtaaatggtttattagtgatagtaagcatatacgctgtaagaaaaggaatcgaagtgctcgcccgcgcggctgagctacttttcggagccatgtatttactgggcgcgatcggcctcgtgctgattgttgtctcaggttctatagacccgcataacttaaaaccggttttggcaaacggtatctctcctgtcctttactcagttttcactcagaccatgtacgttccgtttggcgaagtcgttttatttgtgatgattttccctaacctgaatgacagaaaagatgtgaaaaaaatggggatgattgccatagctattagcggattggttgtggcgctcaccgtggcgattaatatcagcgtgcttgatgttgatcttacactcagatcccagttcccgcttttaagtacgattcagacaatcaaggtcgaagaatttttagaccggctcgatgtcttttttatgctggcgctgatcatcggcggcttctttaaggttagcctctacttatatgccactgtggttgggacatctacgctctttaaggaaaagaacccctctcaattggcttatccgatgggattgggcatcttaatcctttctataacgatcgcgactaacttttcagagcacttgaacgaaggcttgaaagtggtgccgctgtatattcatttgccttttcaattattgtttccgctctttctgtttattgtggctgtttggaaaaagaaacgaagagagaagtcaaaagggacaggagcaaaaaaatgataaaaagagcggggggatgcagccgccgctctttttatgttcacttctatataaaagggggatatagggtgcgcccctgtctgcactggcagaggcgcgttttgttatacgactgcgacgttttccttcacagtaaagcttcctcttgaaagtctgatattgatgtctgacacttttgcaatttgttcatcgtgcgtcaccataatgacgcatttatcttccttgtgcgccagatcctgaaagagccgtacgatctcttttgatgtgtcctcatcaaggtttccggtcggttcatcggctacgataagatccgtgtcacagcagaaagcccttgtaattgatacccgctgctgttgtccgccgctcagtgtgagtactttttgccgggcttgtttttcgttgatgccaaccttctgcagcatgtcaagcgcatatgattcgttgttcttttctttagaacctgtgatttccatagcggttgtgacgttctgcaaagccgtcatatacgggagcaggttgtacgcctgaaagacgattgatacatattgatttctgaaattggttaagccgattttagaaaccgcttttccgccgtaaaggatgtttccttcttttggtgcgtcaagtccgcctgccagagacaggaaagtggttttccccgtccctgatgtgccgacgattgtgtagaatttgcctttttgaaagccgatgttaatatcctgaaacaatggctggcttttgtctttataccagtagccgacttgttgaaattctaataagctcataggttccgcctctttctattcctgttttgtcaatatcgttttcggatgaagccgcagtactgaaattgacggcagcaatgttgcaatgattgcgattaggatgccgatcccgccaagaataagcatgtcgttcatagaaaccgcgacgttcagtgaatcgataacgtccacgtttgatgaactgtggccgaacattttgccgcccatgccgccgccgggcatttgtccgcttgcggtttgcgttgaatcggttgatgaactgatttgctgggataaaagctgatttccaagctgatttgcgacgagatttcccgtcacagatgcaaggccgatagcgataacggccacaatcagaatctcagtcaagaactgtccaatcaatttccatcgtttttcaccgatggccattaacacgcccatttcgtatttgcgctccctgattgacatcatgacaatcaggccaagaatgacggcgcctgccactgatacaagatacaccacgtttttagagaaagaagccacattttcaatcggtccgaccatttgctggtaaagctgatcgtttgtattcagtgtgtacgtatcgaagtcaattgatgttttcttcgctgcttttacgaaagcatccatatttttcgcgtcgtccatatagtaaacagctgagtcaatcgtatttttatagtcgtcgcctttcagcgccgctgttgctgtgtaaggcgtataaagcttgttataaggatttaagaaagagaaattttgggcttggtcatcaccagaagatgttgttttataaataccgacaatcttcagctttaccgtcgtatcttcatctgttgctgattcaattgtgatcgaatcgccaacgctcaaatcattttcttccgctaatgtttcgttgatcactgttacttttttgccgacatctgattttgtaatcgcgcgtccgtcagtgatttttgaatccccgtcagagaaatcatcaactaatgctgtgctgatgacaccttcaatcgaaagatcagcttgaaccatttgcggtccgccttgtcctccgccttgactgtttttagcgtttgagcttgaactgctggagctggaatcacttgaactagagctttcaatcgcatcaaagtttcccgcgttggctgaagctgatgtggtgtaattgtagctcttcacatgatcaagcgctgcaagcttattcgcatcagacactttgatcggtgtggattcgaagctgcgcttttcaccgctgtcctgctgtttttccatttgcttttggcggtcaacctgaagtgtcacgcttccgccgagttcctgtctggccagttcgcttgatttttgtgctgccgactggatggtaaggcctgatagaacaaagacacatatgactgtaaacacaaataattgcaataacgtttttccctttttagccttcatattccaaaaggcccgtttgataaagttcatttatgttcctccgtataggtttttttatggataagaccgcctctggggcgcgcccgctgataaattaatagtagtccaaaggtatgaaaaaaatatgaacaatctatttctagttgatgaaataaaaactaacaattgtgaaacgcaaaaccttctgtttaaaatggtgctattatataaaaaagcatcaaaacaaccggaggatataatgaaaatattaatgatagaagataatgttagtgtatgtacgatgacggagatgttcttttttaaagaaggttttgaagcggaattcgttcatgacgggttagaagggtaccagcgttttacggaagaaaattgggatctgatcattttggatatcatgcttccatctatggacggcgtgaccatctgcagaaaaataagagagacaagcacggtgccgattatcatgctgactgccaaagacactgaatcagatcaggtcatcggttttgagatgggggcggacgattatgtcacaaagccgttcagcccgctgacattggttgcccgcatcaaagccgtcatcagaagatataaggcgacaggcaaagcggttattgatgaagatatgattgaaacggaatgctttaccattaataagaagacgagagaagtattattaaacggagagcctgtagaaaatctcacgccgaaggaattcgatctgctttattaccttgtccaaaatccgcggcaggtgttctccagagaacagctgcttgagcaggtatggggctatcaattttatggagatgagcgaacggttgacgttcatatcaaacggctgcggaaaaagcttgccagcgaggacaagcctttcctgtatactgtgtggggagtagggtataaatttgatgaagattaaatatttatatcagctgctgctaagccatatcagcattttgattttagcgtttgtcattatcatttctctgttttcccactttgtgaaggaatttgcctatcagaacaaagtagaggaattgacgtcatatgcggtgcagattgcaaatgaattccaagccggccaggtggacatgcgcaggctctatccttatcaggacatgttaagcacaagaaagacgcagtttatcatctttaatgaagagcagcagccctattttcttcctgaaggctttcatcacccaccaagggaacagctgaagaagtcagaatggaataagctaaaaaaagggcagactgtcatgatcagggcagatggccgttttgatgatgaagtgtcacttgtggcgcagcctatatttgttcagaacgaatttaaaggcgccgttctgctgatttctccgatcagcggtgttgaacagatggtcaatcaggtcaacctctatatgttttatgctgtgatcagcacgcttgtgattacgattctcgtgagttggcttctgtccaaattccatgtcaagcggattcaaaagctgagagaagcgacagataaagtggcttccggcgattatgacatccatttggaaaacagctacggggacgaaatcggcgttctggcgtctgactttaatatcatggcgaaaaaactaaagcagtcaagggatgaaatcgatcgccttgagaagcggagaaggcagtttatcgctgacgtgtcacatgaattaaaaacaccgctgacgacgatcaacggtttggttgaagggttgaacagccatacgattcctgaggataagaaggataaatgcttctcgctgatcagtgaggaaacgaagcgcatgctgcggctcgtaaaagaaaatctggattatgaaaaaatcagatcccagcaaattacattgaacaagctagacgttcctctgatcgaggtgtttgaaatcgtgaaagagcacttgcagcagcaggcggaagaaaaacaaaacaagctgatgatccaagtagaggatcacgtcatcgtacatgccgattatgaccggttcattcaaattctcgtcaacattacgaaaaacagcatccaatttacgaaaaacggtgacatttggctgcgcggaatggaaggttataaagagacgattattgaaattgaagacacgggtatcggcattccaaaagaggatattgagcatatttgggagcgattctataaagcagatatttcaagaacgaacacggcatacggtgaatacggactcggtctctcgatcgtcaggcagctcgttgaaatgcaccagggcacagtagaaatccagagtgaagaagggaaaggcacaaagttcataatccgccttcctttaacggcaaaacagcaatagcatacagggcggcgcatcaattgatgcagccgccttttttgcacaccgcttcggtttattgcgtgctcccgaaaacaaagattgcgtgtttttcgggttgggacggtctataaacatgataaaatatgacataaacagtttttgatgggagagggtgaaggaatgaagagcggggtaattccttcttcagcggtcggtcaaaaaattaacgagtggtacagatatatccggacattcagcgtgccggatgccgaagtgttaaaagctgaaatccagcaggaactgaaacacatgcagcatgattccaacttgctgctttattattcactaatggaattccggcaccagcttatgctggattatcttgagccgttagagaaattaaatatcgaagaccagccaagcctgtctgaattatcaagaaacattgacagcaatcaggcagatctcaaagggctgctcgactattacgtgaatttttttcgcgggatgtatgagtttgataagcgggaatttatttctgccattacatactataaacaggcggagaaaaagctctcctttgtcgcagaccatattgaacgggctgaattctattttaaaatcgcggaagcttattattatatgaagcaaacgtatttttcattgattaatataaaaaacgcctatgaaatttacgtggagcaggaaacctataatgtgagaatcattcagtgccatttcgtgttcggggtcaacctgatggatgaaagaaatttcgaacaagccgcacgccatttcaaattggcgctcaatatggcccaagcggaacaaaaagcccagctggtcggaagagcatactacaatctcggattatgctattacaatcaagaccttctaggccctgccattgattactttgaaaaagcggtctccacgtttgaaagcagcaggatcgtcaattctctcccgcaagcctattttttaatcaccctgatttattataaacagggaaaacatgataaagcttcggaatatcacaagcggggctatgaatatgctaaagaaacagacgatgcagactatgccgtaaaattcgagtttttgcaatccctatatcaggatcagcccaatgaagaaggaatcgaacgatgtttccaatacttaaaaaataaaaatatgtacgctgatatagaggatttagccctagaagtagcaaaatattactatgaacagaaatggtttaaactgtctgcttcctactttctacaagttgaagaggcaagaaaacaaatacaaaggagtgaaggtttgtatgaaattgaaatctaagttgtttgttatttgtttggccgcagccgcgatttttacagcggctggcgtttctgctaatgcggaagcactcgactttcatgtgacagaaagaggaatgacgtaagaacaagccccttctcattagcgagaaggggtttttcttttcaaaaaaacaccgcaagacatagtcttgcggtgccgccttcatggagattacgtttatttagtagcctcctacaaatgcagttcccacaatgatcaagaggataaataacacaacaatcaaagcgaaagaagttccgtaacctgacattttgtgcacctccttgcgagattgcttcagcaaatgctgcaaaactgtggcggacagggtcccgcagagacggtcagcagcttagaagccgccaacaaacgcagtccctacgataattaatagaataaacaatacaacgattaaagcgaaagaactgatgccgccgtaaccgccgccgttagagtatcctgacataaggtttcacctccctatgaaggatactataagatatgctgaaccgatccatttggcagggataatagtggacaagagaaaaaatgaagaattcggctatatgaaggtgatataaaaaaatagcgggcgctgccgcccgctatttatgtacgattaagagatcagcacgcccgcgaaaaattcctggtataacgcttgaacggcttttctttcttcggcttcttttacgccaaacatcatgctcacttcagaagacccctgattgatcatttcgatattcacctgtgcctctgataatgctttggcggctcttgccgttgtaccgacattgtggcgcatcgcttcccctacaaccataatcagggcgagatgatgctcgacgatgacttcatcggcatgcaaatcctcttcgatccgtttgatgacgctgcgttcagtggcggcatccatttgcccctgccgtaaaatgattgtcatgtcatcgattcccgatggaacatgctcatacgtcaaaccatgctcctccaggatttgaagggctctgcggccaaaaccgatttctctgttcatgagatacttgctgatataaatgctgcaaaaaccggtgtcgctggcaatgccgacgacaggcccgtttgtgttatcccgcttgctgacgacgcgggtgccttcggctgaggggttgttcgtatttttgatctgaacaggaatccccgctctgaatgccggaatgagcgcttcatcatgaaacactgaaaagcccgcgtaggacagctcccgcatctctctatatgtcagctcgctgatttcctttggattctcaacgaaggacggattgacagaatacacagcgtctacgtctgtaaagttttcgtacaaatcggcttgtagtccgttggcaagaatcgaaccggtaatatcagaaccgctccgtgagaatgtgatcacatcgccatccttgctgaatccgaaaaaaccgggaaaaatgatgagtccgtcacgttcccgaagacgatagaggttttgataggattcaggaagaacttgcgcgttgccgggttcatttgtcacaaagaggccggcatccttcgggtttacatatttcgctttgacgcctttataacggaagtaagcggcgatcagtttggcattgttatcctctccgctggccttgactgcgtcaaggtattgttcgggattgcttttgtctccttctaaaagcgtaaacagatcatctctgattttttcgataatgctttgccccagctgaagctcattggcgatgagagcgtaccgttccacaacagcttccgccagttcaggtgcgctgcctgttgccaaatattgttctgcacatgcgattaagagatcagtcactttcgtatcctcggcatagcgttttcccggagctgaaacgactacagctttccgtgccggatctgaggtaacgatgtgaaacaccttgtcaagctgggcgcctgaagcaagtgagctgcctccgaatttaacgaccttcatgtttacatctcctaatgtttaaaattttcacacaaatttagtatttattatctctctttcagtactgtaaatcaaggggggatttctttctcaggagaacatttgtatttttcacgaggaataatgttaggtttgctgaccgtatgcctgcgttataaagataaatatggtaaacagcctaacgttttgggatggaaaatggttagaatgattagtaaaattgataaatgactaggttaatatttttaaagaatattgactaaccctataaaaatggtaatatgtaaatgataatgataatcaattactatatggccatattgttttgagtccttgcggagtaggagatacgttctttttgctgtaaggatgtaaggaggcagcatgaagctacgttacttatttattctacttatcatattagcagtcacatctgtatttatcggtgtagaagatctgtcgccgcttgatctcttcgatttaagcaaacaagaggcgtcaacgctgtttgcaagccgtttgccgcgattgatcagcattgtcattgcgggattaagcatgagcatctgcggtttgattatgcagcagatcagcagaaataaattcgtgtcaccgacgacggcgggcacgatggattgggcgaggctcggcattttaatttccttgctgctgtttacatccgccagtcctttaatcaaaatgctggtcgcgtttgtctttgcccttgcaggaaattttctgtttatgaaaatccttgaaagaatcaagtttaacgacaccatctttattccgcttgtcggtttaatgctcgggaatatcgtcagttcaatcgcgacatttatcgcatataaatatgacttgatccagaatgtgtcatcatggctgcagggagacttctctttagtcgtgaaaggaagatacgagcttctttatctgagtattccgctcgtcatcattgcctatgtgtatgcggataaattcacattggccggtatgggtgaaagcttttctgtcaacctcggcctcaagtataaacgggttgtgaacatcgggctcattatcgtgtccctgatcacgtctcttgtcattttgactgtcggtatgctgccgtttctcggtttaatcatcccgaatattgtatcgatttacagaggagacaatctgaagagcagcctgccgcatactgcgctgttgggagcagtttttgtgctgttttgcgatatactgggcagaatcattatcttcccttatgaaatctcgattggcctgatggtcggaatcatcggcagcggcattttcctgtttatgctgttaaggagaaaagcctatgcgtaaccagatgaaaatagctttgctcgttggtttagccattgtatgtattggcttgtttttgttttatgacttaggcaattgggattacaccctgccgagacgaatcaaaaaagtcgctgccattgtgctgactgggggagcgattgcgttttcgaccatgatctttcaaacgattacgaacaaccgcatcctgacgccgagcattttgggccttgattctctctacatgctgattcagactggcattatctttttgttcggttctgcgaatatggtcatcatgaataaaaacatcaactttatcatctctgttctgctgatgatactgttttctcttgttttgtatcagatcatgttcaagggtgaggggagaaatatctttttccttctgcttatcggaatcgtgtttggcacgctgttcagcagcctgtcttcttttatgcagatgctgattgatccgaacgagttccaagttgtgcaggacaagatgtttgccagctttaacaatatcaatacggatttgttatggctcgcgttcatcatcttcctgctgacaggcgtttatgtctggcgttttacaaaatttttcgatgtgctgtcgctcggacgcgagcacgccgtgaatttgggcattgactacgacaaagtggtgaagcagatgctgatcgtggttgcgattttggtttctgtttcaacagcgctagtcgggccgattatgtttttaggccttctggtcgtcaacctggcgagagaattcctgaaaacatataagcattcatacttaatcgcaggctccgttttcatcagcatcattgcgctggtcggagggcagtttgtggttgagaaagtgtttaccttctcaacgacgctgagcgtcattattaattttgccggcgggatttattttatctacttgctgttaaaggagaataaatcatggtagaggtcagaaatgtaagcaaacaatatggcgggaaagttgttcttgaagagacgtcagtcacgattcaaaagggcaaaatcacctcgtttatcggtcctaacggcgccggcaaaagtacgctgctgtctatcatgagccgcctgatcaaaaaggattccggcgagatttacatagacggacaagagattggagcatgtgacagcaaagagcttgccaagaaaatgagcattttgaagcaggcgaaccaaatcaatatcaggctcacgatcaaagacctcgtcagttttggcaggtttccgtactcacagggccggctgacagaggaagactgggttcatatcaaccaggcgcttagctatatgaagctggaagacattcaagacaaatacttggatcagctgagcggcggacagtgccaaagggcatttatcgccatggtcattgcccaggacacagattatatctttctggatgaaccgctgaacaatctggatatgaaacactcagttgaaattatgaaactgctgaaacggctggtagaggagcttggaaaaacgatcgtgatcgtcattcacgatatcaattttgcttcagtctattctgactatatcgtcgctttgaaaaacggccgaatcgttaaagaaggaccgcctgaagaaatgatagaaacatcagtgcttgaggaaatctacgatatgaccatcccgattcagacgattgataatcaaagaataggtgtttatttttcttaatatatagaagaggtgaggagcatgaaaaagttcgcgttactattcatcgctttggtcactgccgttgtcatttctgcatgcggaaaccaaagcacaagcagcaaaggttctgatacaaagaaagaacaaatcacagtgaaacaccagctcgacaaaaacggcacaaaagtaccgaagaaccctaaaaaagttgtcgtatttgactttggaagcttagatacattagataaactaggacttgatgatatagtagcgggcctgccgaaacaagtccttcctaaatatctgtccaaattcaaggatgacaaatacgctgatgtcggcagcttaaaagagccagacttcgacaaagtggcagaattagatcctgatctgatcattatttcagcaagacaatctgagtcttacaaagaattctctaaaattgcgccgacgatttaccttggtgtagatacagcgaagtacatggaatcatttaaatcagacgctgaaacaatcggtaaaatctttgataaagaagacaaagtgaaagatgagctcgcaaacattgatcactcaatcgcagatgtaaagaaaaccgctgaaaagcttaacaaaaacggtctcgtcatcatggcgaacgatggaaaaatcagcgcgttcggccctaaatcaagatacggcctgatccatgacgtgttcggcgtgacaccggctgataaaaacatcaaagcgtctactcacggacaaagcgtttcttacgagtacatttcaaaaacaaacccggattacctgtttgtcattgaccgcggtacagcgatcggtgaaacatcatctactaaacaagtcgttgaaaatgattatgtgaagaatgtaaacgcagtgaaaaatgatcatgtcgtctaccttgattctgctacttggtacttatcaggaggcggtcttgagtctatggcacaaatgatcaaagaagtgaaagacggtttagaaaagtaaaaccaaaaagagcctccgctaaatagcggggctctttttttgttaatcagcgtgccggctgctgttcggcagggcgctgaggtttctttaatgtgaatgagagaaggaagccgacaagtgcaatgacggcagccactataaaagcggcgttcatgccgtgcagggcggcgtgcttcacatttgtcgtgcctgcatgtgccgcctggttgctcatcacggaaaccaatagtgcggttccgatcgagccgccgacttggcgaatcgtgttgttcatcgcagttccgtgcggaatcaagtggcgcggcagcgcattgattccggctgttgtcaccggcatcatgatcatggcggtgcctaagagacgaacggtgtataaaacgacaatccaagcgagtgacgtatggtcagtcagctgcataaacggcagagatgtcaggaagatgatgcagaaaccggcaatcgccagccctcttccgccgacacggtcaaaaattctgccgataatcggcgacataaagcccatcacaacggctcccggaaggagcataagccctgtatcaaaagctgtgacgtctctgacattttgtgtataaagcggcaggatggtttccgtaccgatcaataatgcaaagacgagggttcccagcagtgttgttaaactgaaaatgccaaacgtgaagacgcggaattccagcatcggtttttcaagcttcatttgtcttgtgataaacaagagcagcgcgatgacacccaccagcagtgaaatcaagacggttgaactggaccagccgtaagagccgacgcttgagaagccgtacagaaggccgccgaacccaaatgttgaaaggatgactgataaaatatcaatctgtgtttttcttaaagtcgtcacgtttttcatcaggatgctggcaagaatcaaatcaatcacagcaaacggaagaataatataaaacaatgatctccaagagaaagcttcgacagcccatccggaaagagtcggtccgatcgcaggcgcgaatgagatgaccaatccgaccatacccatagcctggccgcgtttttcaatcggaaagattgtcaggaatacagtctgcatgagcggcatcataatgccggctccggccgcttgaatgatacgcgctgtcagcagaaccgggaagttcggcgcgaacgctccgacgactgttccggcagtgaaaatgctcattgctgtgatgagcagcgcccggcttgtgaatttctcaattaaaaacgcggtaatcggaattaaaatcccgttggttaacataaatgatgtggtcagccattgtgcttggttggcatcgacattgaaatccctcatgatatggggaagtgcggtaatcaacaatgtctggttcaaaatcgccacaaacgctccggctaacaaaatgccgacaatgacagaacggttaaaaggtttttgttcaatacttgtgttcaatacatatcccttcttttctctaagtaattaacagtgtttttaacatggaaacgggctgtgttaaaacactggtttgttccagatagccaatcagtgatttgagtaaaaaagcgcggggttcttccttcttcgcttcttcctccagcatggcggctgcggatgtcagttcatctacgtcatagtccgcggcggacagggaagagatgcctttatgtaattccttcaggctttccgataataggactgatttatcctttggcttgtaggaggatgctgaatgaatataaagctcgatggcttcgggcggaagaagagactggcgggtttccctgtttttgataatctgattgagggtgctgatgataaactctgcgatcgggtcaagctcaagcggtttttcctcgattttgatcagcattaaaaactcacgcatcatgccgtgaagaatgataaccaaatcccacacaaacgggagaatggtttctccatacgcctggatcagcgaatcgcggtgccagcagataatcgtcgatctggtctgatggatatgctgtttgacccggtcattatgcagcttggggtttccgtaggtcagcatattgaaaaactgctgattccgcctgaagccctccagttccattttgaccttttgcgtcaaacgctcctccggtgtaagtgcggtattttcctgaagtcttgaggctgcggccaccatttgcttctggttaaatgacagcagctccaaaagcagatcttctttagattggaacagcttatatatcgaagcttttgacatcttacattcttctgcgatcgcctgcatggaaaccgacgtaaaatccttttccgaaaaaagctttcgcgcggctaacaagatatctgtttttttatcaagcatctcatggcttccttctttcttgaacattagaaaacccattggttcacagaaaaccaatgagtaactatgaaaaaattttaccaaataaacaaaatagaagtcaatggattttaaccgggtaaatgaaaggcctgccggaaaatccgacaggccgaataagagcttatttttcaactttaaatccttgtttttcaagcatttcacggatgtgcggatagtacaggcgctcatagtaggaagcgatgctctgtgaccaatttcttgtttcttttccgtttgtccgtttattcatgtattcagacatctgttcgtcgtatgcctgaatgtgagacgtcagctcatcctgattcaaataagtttcctgatgattgacagcttcctgcggcaagcgcggttttttcgctgaacggtcggcaggatgcccaatgacaaggccggataaagggaacacgtattttggaagctcaagcagttcgatcagctcttgagggtttccgcgaaccgcaccgatcggaactgtgccaagtccgagtgactcagccgctgctgttgctgtgccgagggcaataccagcgtctactgcgccgacaagaacagattccaatccatttgtgatttccattttgaaatcatgcagatcttcaagcgcaattttggcccgattgaaatctgcgcagaacagcaggaaaacaggagcttgatcgatccatggctggccgcctgccagctcggagattttctttttgcgctctttatcctggactgtgatcacagtcacctgctgtccgttgatagaagaaggggctgattgcaccgcttcaatgatttggtccaattgctcctgagctacaggctcatctgtgtagctgcgaatcgagcggtggtcttttaaagatttaatcacttcattcatatgggacaccctttctttactcgctaagctctgtgcggacaacatcaagaggggcgctcagcagttcttttccttttgcgacaaacccttggaaatgcgcagtttcgttatggaatttcattgccgcttcatctttccatttttcaagcatgacaaatgtattttcttcgcctactttttcgaataggtcgtattgcgcgttgccttcctcagctcttgaatgctgaacaagtgattgagcctcgctcaaaaattcctcgcgtttttctggttttactttgatgtaagcttgtaatacgatcatttaaatctcctccgttgttatgcgaatttattgttcgaatttcatcgaactaaatgtaacatgtattctaaatgaggtaaaggaaaaacccttatatagtaaaattgtcattctaattgttgtgtgatacatttgtgtcatgaacattccaaaccatccagaaacagaaacattgcagctgacaaaggttcttcatgcacttagtgatccgcttcgtttagagctcgtcaagcaattagctgaagcaaaagaaaaaacgtgcagcacctgtgcagatgtgcaggttgccaaatcgactttgtcgcatcattttaaagttttgagagaatcgggcatcgctcaagttcggatagaaggaaagcgccggtattattcgcttcgcgctgaagaccttgaaaaggcatttccgggcctgcttgaagccgtgctgaatgtagaccaggaccgctggtgaatcaatcccctgtaacggggatttttttatgtccgtaaaccgctttgaaaagccgctgcacacccgcctgaatatcttcttccttcagccgtgcaaagccgataatgagagcaggcctgcccgtttgccgcttgttttccttcaagttaaatcggctcattccgaatatttcaagctgcagcccggcagcatgtgacaggatgtcttgttcggtgcgcctggtatcaaattcggtaacaaaatgcagccccgcatttgccccttttacggtaacctctccgctgaactctgcttctaaagcggtgatcaggcgttctctcttttctttataatgctgcttcattttttttatatgcttctgatattcaccagactcgataaattcctgcagggtgagctgtgtgagtgatgagcaagtctgcagatcatagccccgctgtttgtatgccctcaacagctcaggcggcaacaccatatagctgatccgcaagccggggagaagggactttgaaaaggttcccatatagatgacattttgaaaacggtcgaggctttgcagcgccggaatactgtctacatcatatgtgaattcactatcataatcgtcctcaatgatatatcggcgcggctcctcggctgcccagttcagcagctgaattcttctggatacaggcataatcgttccggacggaaactgatgcgacggggtggtcaccagcacatctggctgctgtctggtgatttcagcaatcgacatgcctttttcatccagcatgatcgtctttacttgttttccggcattcttcaaaagctgatacatgcgcctgtagccaggctcctccatcgcatacacggcttccttgggtaaaagctcagtcaacagctgcatgagcacctgtgtgcctgcccctatgatcatttgttccggcctgcattttacacccctcgtcagggaaatgagcctcgtaatggccgctctcacttcatatatcccttgcggatgtgacatatcgccgagcgtgcggtatgagcgggaggccgctttttgctcgcagcggaaccagcttttgatcggaaaatggtctgtatcggaactcatgtgtgaaaacgatatccaatcgctctggtcgatgtgaatctcttttaggtcatccggcagtgcaaatggagggtgctcctcggcggaaaacatgtctagttcctccacgaagaaaccctttcgttcaatggcgtacaaatacccctcagccagcagctgctgataggctgaattcactgaatttacgctgaccttgagattttcagccagctcccgcttggagggaaccttcgagtgcggcagcagattgcggctgaggatttcttttttcagcttttgataaatttgctgatagatataatcggcttgttctgaacgatcgagtgtaatcgtgatatccatttgtattttctccttctgataccatcaaaaagttataattggtacttttcatcataccaaagagaagtcagaatgataagaaaataccgacagggggatattcacatgagtcaaacaacagcaagcatcacaactgcacaatggcagcaaaaacgggatcaatttgtgtcaaaaggtgtgagcaacggcaaccgcagtctggcggtcaaaggagaaggggccgagctgtacgatctggacggccggagatttattgattttgcaggcgccatcggcacgttaaatgtcggacactcgcatccgaaggtggttgaggctgtgaagcggcagacagaggagctgattcatcctggctttaatgtcatgatgtacccgacttatatcgagttagccgaaaaactgtgtggcattgcaccgggcagccatgagaaaaaagcgatttttcttaactcaggggcagaagcggtcgaaaacgctgtgaaaatcgccagaaagtatacaaagcgccaaggcgttgtctcgtttacacgcgggtttcacgggcgcacgaatatgacgatgagcatgacaagcaaggtaaaaccttataaattcggtttcgggccttttgcgccagaggtttatcaagcgccgttcccttattattatcagaagccggccggcatgagtgatgaaagctatgacgatatggtcattcaagcattcaatgatttctttatcgcttcagtggcgcctgaaacggtggcgtgtgtcgtgatggagccagtgcagggagaaggcgggtttattattccttcgaaacggttcgtacagcacgtcgcttcattctgcaaagaacacggcattgtttttgttgctgatgaaatccaaaccggctttgccagaactggcacttatttcgcaattgagcactttgatgtagtgcccgatctgatcacggtttctaaatcgcttgcggcaggcctgccattaagcggcgtgatcgggcgttcggaaatgcttgatgcggcagcgccaggggagctgggcggcacgtatgccggcagcccgctcggctgcgcggcggctttggcagtcttggatattatcgaagaagaaggactgaatgagcgatctgaagaaattggcaaaatcattgaagatagggcgtatgagtggaaaaaagaattcccgttcatcggtgacatccgcagactcggggcgatggccgcaatcgaaatcgtcaaggatccagacacgcgtgagcctgataaagcaaaagcagcagcgatcgcggcctatgcgaatcaaaacggattacttttgctgacagcgggaattaacggtaatatcatccgctttttgacaccgctcgtcatctcagacagccttttaaatgaagggctcagcatcttggaggcgggcctgcgagcttaatcattggaaagaaaacggctgggtctgctatcattttaagtaatcatgaaaagaaaggaatgttcaatatgccagatcaattaacggtctacaacccggctacgggcgaggagatcaaaacgattcctcagcaatcagccacagaggtagaagaagccattgaacgttcacatcaagcgtttaaaacgtggtctaaaacatcagcgaacgaaagagcgtctcttttgaaaaaatggtatgagctgattgttgaacataaagaagagcttgcagatttaattacaaaggaaaacggaaaaccataccaggaagcagtcggcgaggtactttacggcgcaggctatatcgaatggttcgcagaggaagcgaagcgtgtgtacggaagaacggtcccggccccgacaacgggtaaacgaattgttgtcacacgccagccggtcggccccgttgctgctatcacgccctggaatttcccgaatgcgatgattacacgcaaagcggcgcctgctcttgccgctggctgtacatttatcatcaagccggcgccggacacaccgctgtctgcttatgaactagcgcgcctcgcatatgaagcgggcattccgaaggatgttcttcaggttgtaatcggcgatggagaagaaatcggaaatgtgttcacaagcagtccgaaaatccgcaaaatcacgttcacaggctcaacacctgtagggaaaatccttatgaaaaacagcgcggacaccgtgaagcacgtctcaatggaactcggcggacacgccccgctgatcgtagatgaagatgcagacattgaccttgccgttgaacaggcgatggcgtccaaataccgaaacgccggccaaacctgcgtatgtgccaaccgcctgatcgttcatgaatccattaaagatgaatttgctgcgaaactgagcgagcaagtgtctaagctgaaagtcggaaatggacttgaggaaggcatcaatgtcggcccgatcatcaacaaacgaggcttcgaaaaaatcgtcagccaaatagatgatgcggttgaaaaaggcgcgaaggttattgctgggggcacatatgaccgaaacgatgacaaagggtgctactttgtgaatccgacagtgctcaccgatgtcgatacgtccatgaacatcatgcatgaggaaacattcggcccggtcgccccgatcgtcacgttttctgatattgatgaagcgattcagcttgccaacgatacaccgtatggcttggctgcttacttcttcacagaaaactaccgccgcggcatctatatttccgagaatttagagtatggcattatcggctggaatgacggcggaccgtcagcggttcaagcgccattcggcggaatgaaagaaagcggcatcggccgtgaaggcggttcggaaggtatcgagccgtaccttgaaacaaaatatttgtctatcggtttataaaagaatgcacgctcctgagagctgccggattttccggcagctctttttgtgttccggcgaataatcacaacaattccagccaaaataacagcaaatacattttgaaagaaggttccccaacaatggatttattattggctcttctcccggctttgttttgggggagcattgttctcttcaatgtgaaattaggcggcgggccgtacagccagacactgggaacgacgatcggggcactcattgtttctatcgttatttacttttttgttcagcccgttctgtcccttcgcatttttattgttggaatcgtatccggcttattttggtcacttggacaggccaaccagctgaaaagcattcaattgatgggcgtgtcgaaaacaatgccgatttccacaggaatgcagctcgtttccacctcgctgttcggtgtgatcgtgttccgcgaatggtcaacaccgattgcgattacgcttggcgttctcgctttgatctttatcattgtgggaatcattctcacgtccttggaagataagaatgataaaaaagagggcgagccaagcaatttgaaaaagggcattttgattctccttgtttcgactcttggttatttggtttatgtagtcgtggctagattattcaatgtgtccggctggtccgcgctgctgccacaggcaattggcatggtggtcggggggttagttttaacctatagacacaaaccctttaacaagtatgcgatcagaaatattctcccagggttaatctgggcaggcggaaatatgtttttgtttatttctcagccgcgagtcggcgttgcaacgagcttttccctttcacaaatgggaattgtcatttctacgctcggcggtattttcatcctgcgtgaaaagaaaacgaaacgccagctaatagcaattgcgatcgggattatcctgataattgccgccgccgtattcttaggaatcgccaaaacaaattcataacaaatggaggaggatgtatatgtatccggatttaaaaggaaaagtcgtcgctattacaggagctgcttcagggctcggaaaggcaatggccattcgcttcggcaaggagcaggcaaaagtggttatcaactattatagtaataaacaagatccaaacgaggtaaaagaagaggtcatcaaggcgggcggtgaagctgttgtcgtccaaggagatgtcacgaaagaggaagatgtaaaaaatatcgtgcaaacggcaatcaaggagttcggcacactcgatattatgattaataatgccggtcttgaaaatcctgtaccatctcacgaaatgccgcttaaggattgggataaagtcatcggcacgaacttaacgggtgcctttttaggaagccgtgaagcgattaaatatttcgtagaaaacgatatcaagggaaatgtcattaacatgtccagtgtgcacgaagtgattccttggccgttatttgtccactatgcggcaagtaaaggcgggataaagctgatgacagaaacattagcgttggaatacgcgccgaagggcattcgcgtcaataatattgggccaggtgcgatcaacacgccaatcaatgctgaaaaattcgctgaccctaaacagaaagctgatgtagaaagcatgattccaatgggctatatcggcgaaccggaggagatcgctgcagtagcagcctggcttgcttcgaaggaagccagctacgtcacaggcatcacgttatttgcggacggcggtatgacacaatatccttcattccaggcaggacgcggttaaacaaaaaaagcgacccagacatcacatctggatcgcttttttattacgcacgctttttcttaacaagtgctgctacagataaaataatggcagccgcagacagcacaatcgctgtaatgtctagagctgaagaacctgagttttcggaatcgtcttttgttttcgtggcgctgtgctcatctgtcacttgttttgcagacgtgatgtttgtaatggaatgaggtgtatcggcatcctcgtcacctgtccactcaacaatgctgccgtctttgtaatattggtatgcgtcccaagcagcttcctccgctttgtcagggtttttggcaacaaaggtaaactgctggaactgtccttcctgaatgcctccgtcagtcgcctcccatgtcacggacactgatttgtcatcatgtttttgagtggagaccttccagcccggaattggctcatattgctggaattcaacatccttcggcattttgaggactaccttcgttgtcggcagatttttctctgaaggaaccttcattgtatacgtttcccaagagcctgcagcagactcagccggttttacagaaacatgcgcgctggcaggggccgtaaagaataagagggagccgacaatagccggacatagtgtcaatgcgatttttttcaacaacgtaaacactccttaattggtctttgtaaacatgatattgatttcgttaaagtcgccggtcaggccgtggactttgatcttccagtttcctttttcattaatcgacaggttttgatcctggaagacgccttttgttttttcttttaatgtaaaagtgcttttgttttcgctgcctgacaggcctgttttataaacggttaacgtgatttgctggatgtttttcacgggatctccgttatggtcggtgacccgcagctcaaaaacattttttccgggctggtttgggctgatgctgagagaaacgctttgtccgttctcaatcgctttggtttggtagaacggttccggcgccggctcaggcgggcttggcaggcttgtaaacacggccgctgtgatcaatacagcgatgccgattgcccactccgctttcaacgttcggctgattcctgtgcggcgctgctttctggtaagcagaaaatgaatcgtgcctaagaccagcatgaaaacaaacagcccgcttttcactaaaagagcttgtccgtacgctgtatggaacagtgaatccattgaacgaatgatgaaaaatccattgagcaagcctgaaaacaaaatgacgccgactgcagtgagcgcccatggggagaaccgtctgaccgtctcccacgcgagcgttttgtcaggctgcctccattcttttgagagcagcaaaacgagtgccgctattccgccgacccagatggaagcggaagttaaatgaaggaaatccatcaaaatgccgaccgttttttcttcaacgacagcagcatgcccggtaaacgccttggcaagcaggagaccgaaaaagaaaatgagcggcgctgtccaatagccaaaggatgaaaagcggtttttccgtatcgcagggatgacagacagtgcgagcagcacgaacagcgcagcctgtatgatccaaatggagccgcctgctgtctcaaacagtgtttctctgatgtagcccgcctggaatgcgctgccccagccgccgcctgcgttcgcttttgtctgaatcggaagctgaagcaaaagcgccagacccagtgctgcgatcgagccggtcaggatacgtctcgtccgtttgacgagctgttctgatttccctttataccagaaaagatggaagaaaaccgttccgataaacagagataaggctgtatacagaatcgcgcgatctgctgctgttcccggattcagcgctgaatcggctgctttttggctgctgaatccgccatccgctttcccgatactgaacggaatgacgccggaaacaggatgtccatccgcggatacggcattccattccgctctgtacacatctttaggcagattcttcttcagcttcactgtcatgatgtgatgattatcttttttgatttcagtcttgtccgtatccacacggtcgccgtttgaattatagactttaatgtaatgaaacccttcttcaaccggttcattaaattcgatttccacctgcgcaggggcgctttttaattcgctgttttccccaggtgaagatttgacaatataggcgtgagcaaagcttgttttcggcaggaaaacaagaaaaagcagaaggatgatccaccatctgtttcgcttcatcactcagacaccaccttccgctgtatgtgttgtgttatttcttggtgcaggtgcagcgtttctttcggtcttgaagcatatcttccagcgcttggtcgaaagtgcggacggctccgccgaatcctttttgaaatcgttcggcatggtcaagtgtcgcaaacggaatggcctgcggctggcagcagtgcaggtttaattcagcatttacgacgaaataagccgaaccggcactgacggttgtctgtaacagaaaatctctgcaaatcaagtgtgaaacctcttccgttttatccgcgtaacgcaaaaacgcgcaatgtgcgcagcatagctgttcaatgtcttggtttaccgtaatcagctgaaccgaatgagcttgattgacgggcttcaagcaatagctgcacatatgatccgtttgaggtgttcgggcggggagcgtgatgccgccggccgttttaatgacctgatttgactgaaccagctgattgacatctctgtataccgtcatttccgaaacgccaaaccttgcgctgatgtcagaaattctgagcgcgccttcttctttcagccacttcagtatgtgttgctgtctattaatcggaagcattcatacaccctcttcattaagatctatttaagcgtagaggattttagagacagagacaagtaagctgatgataaaaaatgtgaaaatgtgttgaacaacaacaaaacgaaacagaagggactctggtataatagacatatggaatagaaagtgaggaataccctatgaaagaaacaccatgcccgaactgcggcaaacctttgacaggcgacatggtcagatcatcaaatgtgccttgtcaatttcgctgcggacactgccgggaacggctttatgaatataaagtatcagctccgattatgctggtatcattagcggccatcgtgctgctcatttatcttttgctgctcctccgcaatgcggcaggttcaatgctgccggctgtacagcacgtgccgatggctgtttttgcgcttgtgtgcgcctatcccgtttttattgtgagtgagcgaatgatcgcaaagtacgtgattcaaaatggcaacatcatttatagaggaaagagaaaaggctcctgatatcaggagcctttttatttttaaaaaattgtcacagtcatgtgccaaagtcctctttactttcaattgtatagggactgtaagcgttttaacatagagtcaaagggaagcatcattctctgaacatatttttttatcttacagcgacaaacaaaacagggagggtttatatatgcagcagcaagaacagcagcaaggcggcatgaaagtgaaagtgcaacgctttgggagttatttgagcggaatgatcatgccgaatatcggcgcgtttatcgcgtggggtatcattaccgcgctgtttattccggcaggatggtttccgaatgaacagctgaacacgctggtcagcccgatgattacgtatttattgccgcttttgatagcgtatacaggcggaaaaatgatctacgaccaccgcggcggagttgtcggagcgacagcggcaattggggtgattgtcggatcggatattccaatgtttttaggcgcaatgattatgggtccgcttggcggatacctcattaaacagactgataaattattcaaggataaagtcaaacaaggctttgaaatgctgatcaacaactttacggcagggattgtcggcgcggctttaacgattctcgcgttttacgccatcggcccggttgtcctgacgctaaataaattgctggcggctggtgtggaagtcattgtacacgctaatttactgccgatagccagtgtttttgtagaaccggcgaaagtgttgttcctcaacaacgccattaaccacggaatcttaagcccgatcggaatcgagcaagcatcccaaacaggaaaatcaattctgtttttagtagaagcaaaccctggaccggggctcggcattttgctggcgtacatgttctttggcaaaggatcttcaaaatcaacggctcccggtgcggcgatcatccatttcttcggagggattcacgagatttacttcccgtacattctgatgaaaccggccctgattctcgcagccattgccggcggagcaagcggactcttaacgtttacgatctttaatgccggacttgtcgcggcagcgtcaccgggaagcattatcgcattgatggcaatgacgccaagaggaggctatttcggggtattggcgggtgtattggtcgctgcagctgtatcgttcatcgtttcagcagtgatcctgaaatcctcaaaagctagtgaagaagacttggctgccgcaacagaaaaaatgcagtccatgaaggggaagaaaagccaagcagcagctgctttagaggcggaacaagccaaagcagaagaagcgtctgagctgtctcctgaaagcgtgaacaaaattatctttgcgtgtgatgcgggaatgggatcaagtgccatgggggcatccatcttaagaaacaaagtgaaaaaagcggagcttgacatcagtgtgaccaacacggccattaacaatctgccaagcgatgcggatattgtcatcacccacaaagatttaacagaccgcgcgaaagcaaagctgccgaacgcgacgcacatatcagtggataacttcttaaacagcccgaaatacgacgagctgattgaaaagctgaaaaagtaatcttatagaaagagagtgatactcatgcaagtactcgcaaaggaaaatattaaactcaatcaaacggtatcatcaaaagaagaggccatcaaattggcaggccagacgctgattgacaacggctacgtgacagaggattacattagcaaaatgtttgaacgtgaagaaacgtcttctacgtttatggggaatttcattgccattccacacggcacagaagaagcgaaaagcgaggtgcttcactctggaatttcaatcatacaaattccagagggcgttgagtacggagaaggaaacacggcaaaagtggtattcggcattgcgggtaaaaataatgagcatttagacattttgtctaatatcgccattatctgctcagaagaagaaaatattgaacgcctgatctccgctaaaagcgaagaagatttgatcgccattttcaacgaggtgaactgacatgatcgccttacatttcggtgcggggaatattgggagagggtttatcggcgcgctgcttcaccactccggctatgatgtggtgtttgcggatgtaaacgacacgatggtcagcctcctcaacgaaaaaaaagaatacacagtagaactggcagaagagggacattcatcagaggtcattggcccggtcagcgcgattaacagcggcagtcagcccgaagagctgtaccggctgatgaatgaggcggcgctcatcacaacagctgtcggcccgaatgtgctgaagctgattgctccatctatcgcagaaggtttaagacggagaaacactgcaaacacactgaatatcattgcctgcgaaaatatgattggcggcagcagcttcttaaagaaagagatatacagccatttaacggaagcagagcagaaatccgtcagtgaaacggtaggttttccgaattctgccgttgaccggatcgtcccgattcagcatcatgaagacccgctgaaagtatcggttgaaccatttttcgaatgggtcattgatgaatcaggctttaaagggaaaacaccagtcataaacggcgcactgtttgttgatgatttaacgccgtacatcgaacggaagctgtttacggtcaataccggacacgcggtcacagcgtatgtcggctatcagcgcggactcaaaacggtcaaagaagcaattgatcatccggaaatccgccgtgttgttcattcggcgctgcttgaaactggtgactatctcgtcaaatcgtatggctttaagcaaactgaacacgaacaatatatcaaaaaaatcatcggccgctttgaaaatcctttcatttcggacgatgtgacccgcgtagcgaggtcacctctcagaaaactgggagaaaatgataggcttgtaggcccggcaaagaaaataaaagagccgaatgcactggcggaaggaattgccgcagccctgcgcttcgatttcaccggtgaccctgaagcggttgaactgcaagcgctgattgaagaaaaaggatacagcggcgtacttcaagaggtgtgcggtattcagtcccatgaaccgttgcacgccatcattttaaagaaacttaatcaataaccgatcacccgtgacacaatgtcacgggctttttttactatctcgctatctagtataatagaaagcgcttacgaaaacagggggaggagaatgacgatgaaacaattcgagattgcggcaataccgggagacggagtaggaaaagaggttgtagcggctgctgagaaagtgcttcatacagcggctgaggtacacggaggtttgtcattctcattcacggcttttccatggagctgtgattattacttggagcacggcaaaatgatgcccgaagatggaatacatacgcttactcaatttgaagcggtttttttgggagccgtcggaaatccgaagctggttcccgatcatatatcgttatggggcctgctattgaaaatccggagggagcttgagctttccattaatatgagaccagccaaacaaatggcgggcattacgtcaccgcttctgcatccaaatgattttgacctcgtggtgattcgcgaaaacagtgaaggcgagtatagtgaagtcggcgggcgcattcacagaggcgatgatgaaatcgccatccagaatgccgtgtttacgagaaaagcgacagaacgtgtcatgcgctttgccttcgaattggcgaaaaaacggcgcagccatgtgacaagcgccacaaagtctaacggcatttatcacgcgatgccgttttgggatgaagtctttcagcagacagccgctgattatagcggaatcgaaacatcatctcagcatattgatgcgctggccgctttttttgtgacgcgtccggaaacgtttgatgtcattgtggcgagcaacttgttcggtgatattttaaccgacatcagctcaagcctgatgggaagcatcggcattgcgccttctgcgaacatcaatccatccggcaaatatccgtccatgtttgaaccggttcacggctcagctcctgacattgccggacagggccttgccaatccgatcggccagatttggacagcgaagctgatgctcgaccacttcggagaggaagaattgggggcgaaaattcttgatgtaatggagcaagtgactgccgacggcatcaaaacacgcgacattgggggacaaagcacaacggctgaggtcactgatgaaatctgttcgcgcttaagaaagctctgatgaatcaggccggtggcagatggctgccccggcctgtccatttccttacgaaaatttccacgaaagtctaaccaagcagatccaaatgctgtataataatttggaattcttaggaaagcatcgggtgaaggaagttgaatgcaaaaacaatcacgttaaagaaaaaaagaaaaatcaaaacgatcgttgtactcagtatcattatgatcgcagctctcatttttacgattagattggtgttttacaagccttttcttattgaaggatcatcaatggccccaacgcttaaagactcagaaagaattctggttgataaagcagtcaaatggactggcgggtttcacagaggagacatcatagtcattcatgacaaaaagagcggccgctcatttgtcaaacgtttaatcggtttgcctggtgacagcattaaaatgaaaaatgatcagctatacataaatgataaaaaggtggaagaaccatacttaaaggaatataaacaggaggtcaaagagtcgggtgtaaccttaacgggtgacttcgaagttgaggttccttccggtaaatattttgtgatgggagataaccgtctcaattcactggatagcagaaacggattgggcatgccttctgaagacgatattatcggtactgaatctctcgtcttttatccattcggtgagatgagacaggcaaaataaaatgcaatgcaaaaagaacatggaacatgacggcaccgataataaagcgccgtgcacgtttaaaaaaatgatgatgaaacggtgcggagccggctttccgccccgttttttatgatagaaagcgttttgaagaaaagggccctgttgaaataaacagaatcaggattggcgaagccgtgaagcgcatcgaattggtaaatctcaagatgggtatgctgtttttcccgcagttttttgataagaagcgctacgtcaaacgacggctcataattagggaaaaacaataggaccgggcaggctggcacgtgatgaagagagtcgcgtatccgggaaccgtaataacaaaccgatccgctcacctcaggcatactgctgcatttccatgcgatagtagcccccacgctgaatccaatcacaaagatgtgccgtccggcgttttgcctgatcacattctggatgatggtttctcccgttttcagccgttcgtgttttgtaaattgttcgtatgccgttttttcttcttgcagtgtgtagacttcattctcgccgagcaggttgggcgtcaacacatcatatccagccattttgatcagccggcccatctttttcatatggctgtttacaccgtatatttcgtgtacgagaatgacaagcggttttggggacataacggcctccttttgtgttttttccattatatcctatcgtttcactttaggctgagatataatggtcaaaaaaggagatataaaatgaactcattatctttgcctcaccgctatccatttttgtttattgatggcgtgacggatagcgagcccggcaaacatgcggcagcttataagctgattagtgagaacgactggtttatcactgatacgcaaacagaaatgccgttttcacttgtgattgaagcgcttgcgcaaaccgcggcttttacaggaattacagatgagaacagcttgggattattgtcttcggtgaagaaagcggaaaagctgggagaagctgtgcctggtgaccggcttgatcttacgtttgaagtcacgcgcaatcggcgcgggtttgtgttcggacatgccaaggcgtcagttggagagcagcctgttgctgaagctgaaatcggcatctatattgaaaaatgaaaaaaacccttcacaacattttgtgaggggttctattttgtgtcgtaatcccgttcgctttgagagttatctctttgctggcgtttgtgtttttcatcattcatattttccttcagctcttcattaggaatcggatcggttaagtcgttgtgctcggggttttcatttggtttgttttgctgttttttttctgtcatgtttgatcacctcaccgtttgttttcctcttatccgttctcctcaaacataggaaaccgcttttttgtcccgctgggtataatgtattagaatagagagaagcacaacaaaaagataaagagaggtacatatatgtctgttcaaagagaagatgtagatatcaagctgatcgcaattgatatggatggtacactgctgaacgacgagcagctgatctcggatgaaaaccgcaaagccattcgtgaagcggaggataaaggtgtgtatgtggtgatcagcacgggccggacgcttatgacgtgccgggaactggcggaatcgctaaagctgtcatcctttctaatcacggcaaacggcagtgaaatttgggattcgaattttaatttggtggaacggaagctgcttcatacggaccatattcaaatgatgtgggatttgcggaataagcacaacactaatttctgggcttctacggtgaataaagtatggagaggcgagtttccggaaaacattacggatcatgaatggctcaaattcggctttgacatcgaggatgacgatatccgaaacgaagtgcttgaggagctgagaaaaaacaaagagctcgaaatcacaaattcaagtccgacaaacattgaagtcaacgcgcttggcatcaacaaagctgcagcccttgccaaggttacggaaaaactcggctttacaatggagaatgtgatggcgatgggcgacagccttaatgacattgcgatgatcaaagaagcgggtcttggcgtcgcaatgggcaatgcgcaagacatcgtaaaagaaacggctgattatatcacggatacaaatattgaggatggtgtcgctaaagcgattcgccattgggtactataaaaaaagagagtcctaagatggactctcttttttagtttggcaggttttattctgggaccatggtaggttttctgacaaaagtatttcacaaactgatatgattcacttataatgaaataaagttcaaaaattcggaatagtcgttccgaatttcgggacaataaatgacataaagcatatcgtttgctttggcaggagggattctgtgtttcagattgatttaaactgtgatttaggagaaagcttcggagcctacaagataggccttgaccaagatattttagagtgtgtgacatcagcgaatatcgcatgcggatttcatgcaggagatcctagtgttatgcgaaaaaccgtcgcgcttgcagcagaaagaggcgtgaaaatgggtgcgcatccgggcttgccggatttactcggttttgggcgccgcaatatggcgatttctcctgaggaagcgtatgatcttgtcgtttatcaaattggcgcgctctctggctttctaaaagcagagggacttcacatgcagcacgtcaagccgcatggcgctttatacaatatggcggcagtcgatcaaaaactgtcggatgctatcgcgaaagctgtctataaggttgatcccggcctgattcttttcggtcttgctgagagcgagcttgtaaaagcgggagaacggatcggacttcagaccgcaaatgaagtgttcgccgacagaacataccaatcggacggcacgctgacaccgcgctcccagccggacgcactcattgaaagtgatgatgccgccgtcacccaggtcatcaaaatggtgaaagaaggggcggtcaaatctcagcaaggacatgatgtgtcattaaaagcagatacagtctgcattcatggagatggagcccatgcgctgacatttgcgcaaaaaatcagaaaacagctcaaagcggctggaattgaagtgacagctatttcagaacagaggtcaacataaaggaggaacaatagatggagcagcagaaaaagacagcaggaaaaaaagcgggcagctggtcattgctgatgggcgccgcctttttaatggcgacatcagcaatcggaccgggtttcctcacccaaaccgcaacattcacaaacacactcgcagcaagcttcggttttgtcatcttaatctctattattttagatattttcgcccaaaccaatgtgtggcgcatcatcgcagtttctggaaaacgaggtcaggaaattgcgaatatggtgcttcccggactgggatatttcatcgccattctcgtcgtgcttggcggactagcttttaatattgggaatatcggaggggccgggctgggacttcaggtgctgttcggcattacacctgaaacaggcgctttaatcagtgccgttatcgccattttgatttttgtcatcaaggaagcaggaaaagcgatggaccgttttacgcaaatcgcggggttcgtgatgattattttaacggtctacgttgcggcgacgacagctcctccagtcggacaggcagtcgcaaatacattcgtcccggaacacatcagcatatttgccattgtcaccctagtgggcggaaccgtcggcggttatatcacatttgccgggggacaccgtttgcttgatgccggaattaaagggaaggaatccattccgcaggtgacaaaaagctcggttgtcggcattttaattacatctgtcatgcgtatcgctctttttcttgcggttctaggcgttgtatcgaaaggcctgcacatcgatgaaagcaacccggcggcttctgtcttcaagctggctgctggaaatgtcggttataaaattttcggattgatcatgtggtctgcggcgattacgtctgttattggagcagcctatacatctgtttcatttttcaagaccttttctccaaaaattgaaaagaattcacgcggtattattatcggatttattgtggtttctacgttagcttttgtcacaatcggccagcctgcgaagatcctcgtccttgtcggttcactgaacggcttaattctgccgattgcgctcggaacgctgcttgttgccgcctacaagaaaaacattgtcggtgattataagcatccgctttggctgacaagcacaggcgcgcttgtagtgattgtaatggcagttatgggaatctacacgttaattacacaacttcctcaattgtggagctgatataagtggagcaattaaacaaaatggcgccaaaggatgtacgcgccctgatacgagaggggaaaataaacgggccgaccgcaggcatgtctggcggctacgcccaagcgaatcttgtggttttgaaaaaggaccttgcttttgattttctgctgttttgccagcgaaatcaaaagccctgccccgtgctggatgtgactgaagcaggttcgcctgtgccgtctctggctgcgccggatgctgatatcagaacggactttccgaaataccgtatttacaggcacggtatcctaacggaagaagtatctgatattacgccatactgggaggacgattttgtcggctttctgatcggatgcagtttctcctttgaacaggcactaatcaataatgggatagctgtccggcatattgatgaggggacaaacgtctcgatgtataaaacgaatatcgattgtgttccggcgggggcgtttcacggacagatggttgtcagcatgaggccggttcctgaacggctggctgtacgtgctgcacaagtgacctcgcgttttccggctgtgcacggagggccgatccatatcggcaatccgggagcaatcgggattcgcgatctcgggaaaccggatttcggagatgccgttcccattcgtgacggcgaggttcctgttttttgggcatgcggggtgaccccgcaagccgtggctatgaatgtaaagcctgaaatggtcatcacacatgcgccggggcatatgctcatcacagatattcgagacgagtcgcttgcggtgctgtagcctctcgtcatcctgatgaacgagaaataaaagaggtgagaaagatgactgtacgatatcaaatcgaacagctcggtgattctgcaatgatgatccgattcggagaagaaatcaatgaacaggtcaacggcattgtccatgccgcggccgcttatatagaagaacagccatttccgggattcattgaatgtatcccggcttttacaagtctaaccgtattttatgatatgtatgaagtgtacaagcatttgcctcaaggcataagctcaccttttgagagtgtcaagcgcgatgtcgaagagcggctggcagaaatagccgaagactatgaggtcaaccgccgtattgtagaaattcccgtttgctatggcggtgaattcggtccggatttagaagaggtggcgaagatcaatcaactgtcaccggaggaagtaatcgacattcatacaaacggtgaatatgtggtgtatatgcttggcttcgcgcccggttttccttttctaggcgggatgtcaaaacgcattgcagctccgagaaaatcatcgccaagaccgtcgattcccgcaggttcggtcggtattgcgggattgcagacaggcgtttatccgatttcaacgccgggcggctggcagctgatcggcaaaacgccgctggctcttttccggccgcaggaaaacccgccgacattgctgcgggcgggagatattgtgaaattcgttcgcatctcagaaaaagactatcacgcctataaggaggagtccaattgagcatgaaagtattaaagcccggactgctcacaacggttcaggatataggcagaacgggttaccaaaaatacggcgttctggccagcggcgctatggacacggtttcactgcgcattgccaatctgttgataggaaacggcgaaaatgaagcaggtctcgaaataacgatgatggggcccggtccgtcgtttcatttttcaaaacagacactgattgctgtgacaggggcggacttcacgctgcgtattaatgacgaggaagcgcctttatggaagcctgtgctcatcaaggaaaacagcacggtcagctttggcccctgcaaactcggcagccgtgcttatttggcggcagctggcggcattgaggtgcctgccgtcatggaaagtaaaagcacatacgtcagaggaagcattggcggacttcatggcagagcgcttcaaaaagaagatgaactgaacattggagagatgtcagctctttcgcaaaccatcctttcccgcttaagttcgcagcttggaaaacagggatttgcagcaccgaagtggtcagtcagccgcggcagatttctgccattgaagaagaatcccgtcattcgggtgctggaaggaaagcaatttgcctttttcacagaagaatcaaaaacgcgtttttatgaagaagcatttcgtgtcacgccgcagtccgaccgtatgggctacaggctcaaaggagaaccgctcgaactgaaggccccgcttgagatggtgtcggaagcggtttcattcggaacagttcaggtgccgcctgacggcaacccgattatcctgcttgcagaccggcagacgactggcggctatccgaggatcgcgcacatcatatccgctgatcttccgattgtttcccaaatcatgccgggcgagcacgttcagtttgagcctgtgtccctccaggaggcagaagcgcttgcggtagaacgggaacagcatataaaagaactgaaaacgagaatgaagatggaatggctgacatagcaaaggggatgaatgatgcagaataaaaataaaaccgtagtcaaatctatggcgctgcttaatttgtttttgcataaaccaagcctaaccttaagtgaactggtgtcgctgacgggaatgccgaagacctctgttcaccggatggtcagctccttggaggaaatggggttcctcagtagggatgcgtccggcgcttattcgctgggattggtgtttttggaattcggacagcttgtcgctgacaggctggatatcagaaaaatagcgaaaccggtgatggaagagctgtgccgggaagtggatgaggccgtgcagttgatcatgagggacggcaatgaagcgatatacgttgagaaaatagaagggacacagactgtgcggctgtatacggcgatcggcaggcgttcccccctatacgcgggagcgtgcgccagaagcattctgtcctttcttccccgtgaagaaatcgaagcatacatcaaacaaaccgagctcatttcgattggctccggaacgattaccgatcccgaaaaactgcttcaggagattgatgcctctgtgcaaaatggctatactgtcagctattcagagctcgaaaactatacggcggcgatcggcgccccgatctttaaccatgagcgccaggtggcagccggcattagcattgcaggctttgaagcgagatttacagaagacaggctgccctatttaacagaaaaggtgaaggacgccgctttacagatttcaagaaaaataggatatacataagtagccaatcttttctctgctgcgtacattaacgtatcgacgttcaagagtggaggaaagaacatggtgcttcgatatacagctctgggcgattccttgacgacagggagaggctccgggctgttttcacccggcttcgtccagcgttttggggacatgatggaagctgacttgaaaacaagaacggcaataaacatatttgccagatcaggcctgaatacagaagagattttgggactcctgtcatatccctatgtgcaaaaatgtattcgagatgctgatatgataacgatcacagggtgcggaaacgatctcatcgattcggtcttagcctaccaaacctctaaggatgaaacgattttcagccgtgtatccgcccattgccatgagaattttgaaaagatgattgccaaagtcgccgagattaaaggagaaaatccttccccgtacgccattcgtgtgttcaacttatacaatccgtttcccgaaattgatatcgccggcaaatggatcacttcgtttaattcacatttagaaacacttgcatcagcaccccatgtcaaaatcgcggatgcctatagcatcttcaaaggcaaagaacaggaatatctgtcctttgacggtgtccatccgaacagcaaaggctatcaagcgatggctgaagccgttcacaagctaggctataaagaattatcagtttcatagaaaacgcgcctcatgacaggcgcgttttttatgtgtgatcgaaatattaaaagaaacttaaaattctctgtcttctgttctacagacaaacaaagtgcgctagaataatggagggcgtaggcaaatatagccataacgttcaatatttcgtatataaggaaggatggtccttttgtttcggatttttaaaatgtcttttgcggttatcattattatactggcgcttattgcttttaactatacggaacacacctctgttatccaatcggtcatgctcgtctttcttggtgcggtcatgtttatgcaggggcttgaagaacgcaaaaaagaaaatgacggctcaggcgcttttaatatttataccgccgtttttgtatggtctgtctcccttatcggttttacacttcatattatataaatctattacacatcctgaaaatgctcgaccgtcgggaacggggtatagaaccgatgaagcaaggctttccactcttgatactctgaagaaccgcgaaagccttccgtatggtcctcaagtgtttcccactccacaagaagcagatatttatgcgtttcctccatgcattttgataacgagtgcgtgatatagcccttcatgccggaaataatcggcgccgcttgccggaatgcatcctcaaactcttgttcaaggccttctttaatgtgaagcattgctgcctccctgaccatgctatcccttctttctgtcttttcgaatagtctacagcaaacgataggagatttctgcaaaatcggtgaacttttccttcattttcaaaaaaatcttgcacgcaccaattcaattaagagaaaataacaagtggaaggcaggggaaagtcatgttaaaaaagtgtattctactagtatttctatgcgtcggattgattgggttaatcggatgctccaaaacagattcaccagaggatcgcatggaagcattcgtgaaacagtggaacgatcagcaattcgatgacatgtatcaaagcctgactaaagatgtcaaaaaagaaatctccaaaaaagatttcgtcaacaggtataaagccatctatgagcaggccggcgtaaaaaatttgaaagtcactgcgggagaagtagataaggacgatcaagacaacaagacaatgaaacatatcccgtataaagtcagcatgaacacaaatgccggcaaagtcagcttcaagaatactgctgtgctgaaattagaaaaaacagatgacgaggagtcatggaatatagattgggacccatcgtttattttcaagcagctggctgacgacaaaaccgtgcaaattatgagcattgaaccgaaacgaggccaaatttacgataaaaatggaaaaggtttagctgtcaatacagatgttccggaaattggaattgttcccggagagcttggcgataaaaaagagaaagttataaaagaactcgccaaaaaacttgatttgactgaagacgacatcaagaaaaagctggatcaaggctgggtaaaagacgattcgtttgtgccgctcaaaaaggtcaagcctgaccaggagaaattagtttctgaagcgacgtcattacaaggcgtaacaagaacgaatgtcagctcccgctactatccgtatggcgaaaagacagcccatttgacaggctatgtccgcgccattacagcggaagaactgaagaaaaagaaagaaggaacgtacagcgatacgtctaacatcggtatcgccggacttgaaaatgtgtatgaaggcaagctaagaggcacaactggctggaaaatctacgtgccgcaaaccggggaagtcatcgctgaaaagaaagcaaaggacggcgaggatcttcacctcacaattgatatcaaaacgcaaacgaagctgtatgatgaactgaaggatgacagcggggcggcagtcgcgctgcagccgaagacaggcgaaacactcgcccttgtcagcgcgccttcctacgatccaaacggatttattttcggctggagcgataaggaatggaaaaagctaaacaaagataaaaacaacccgttttcagcgaaattcaataagacatacgcgccaggttctaccattaaaccgattgcggctgctattggaatcaaaaacggcacccttaaagccgatgagaagaaaacaatcaaaggcaaggagtggcaaaaagattcgagctggggcggctattcagtgacacgtgtgtctgagagacttcaacaagtcgatttggaaaacgcccttattacgtcagacaatatttattttgcccagaatgcgcttgatatgggagcggacaccttcacaaaaggcttgaagacattcggtttttcagaggacgttccgtacgaattcccgatccagaaatcgtctattgcaaatgacaagcttgattcagacattttgcttgcggatacaggctacggacaagggcaaatgcaaatgtctccgcttcacttggcaactgcttacacgccatttgttgacaatggagaccttgtcaaaccgacgctgatcaaaaaagattcacaaacagctgatgtttggcacaagcaagtggtcacgaaggaaggagcggcagacattacaaaaggtctgaaaggcgttgtggaagatgagcgcggatcagcgtatcagcctgtcgtgaaaggaatcacagtggctggaaaaacaggaacagccgagctgaaaacatcaaaagatgataaagacggcacggaaaatggctggtttgtcggctacgattacaaaaacaaagacctgcttgtcgccatgatgatccaaaatgtgcaggaccgcggcggcagccactatgtcgttgagaaagcgaaaaagcaatttcaatcgaattaaaatgtctttttaaaaggagcgaaaggaaaaagaggatctgaggccgaatgaactagtaaggggcaaaacccggtttatacaaagaaaagagggattttgcatgcagcgtattcaattggcggaggatcttcaattttcaagagtcatacacgggctttggcggctgaatgaatggaactattcagatgctgaacttctaagcctcattgaatggtgtatcgatcacggcatcacgacctttgatcatgcggatatttatggaggctatacgtgcgaaaagctgtttggaaacgcccttgccctttcgcctggattaagagaaaacatagagttggtcacaaaatgcggtatcgttcttgaatcgcctgaacggcccgctcacagatcgcatcattataacacaagcaaatcgcatattttggcatccgttgagcaatcgcttatgaaccttaggacggattatatcgatatgcttttgattcacagaccggacccgctcatggatccggagggggtagcagaggcgtttcaggccttgaaatgctctggcaaggtcaggtactttggcgtttcaaattttaaagatcaccagtatcggatgctggaatcatatttgcctgagaagctcgtaaccaaccagattgagctttccgcatacgaattagaaaatatgctcgacggcactttgaacctgtgccaggaaaaacgtattccgccgatggcttggtcgcctctggcaggcggcaaagttttcactggtgacacggaaaaagaccggcgtgtccgcacggcgcttgaatccgttcaagcagagattggcgccgcttcattggacgaggtgatgtacgcatggctgtatacgcatccggccgacatcatgccgattgtcggaagcggaaagcgcgagcggatttccgccgcgataaatgcgttgtcatacaagcttgaccaggatcaatggttccgcatttttacagccgtacagggttacgatattccataaaaagcatcagcttaccagctgatgctttttcaatattgtcacaccgcatagtgccaaattaccatttataagtgattgattctttcttgaaagcgttttatattaaaaggaaacctctctatatcctctactgcatctccttgcgacttcatccgcacatcaagattgtctaggaggtcttttttatgtatatgactgccagagaacaaaagctgttaaagcacttattattacaaaacagatatataaccgtaactgagcttgctgagctgatgcaagtcagcacgagaaccattcacagggaactcaaatcaattaaaccgctgatggaaaccgttgggcttacgttagataaacagcccggtaaaggtttgaaagcagtgggaagtcccgaagataaacaaaagctgcttactgatttatcatatgaacagcatgaatacagcgccgacgaacggaaactgctcattctttgttcgttattagagtctcaggagcccgtcaaactgtacacgcttgctcatgatctccaggtgacgaatgccacggtcagctatgacttagatgagctcgagaagtggatttctcccttcggactgacactgatccgcaaaagaggttttggcatccagcttatagggccggagaatgcgaaacggaaaattgtcggcaacttgattgtgaaccgtctcgacatccaaatgtttttggaagcggttgaattaaacatcaaaggaaaaaccgattcttcagagaaaatgttcggggttgtcagcaaaggtgagctgttaaaaatggagcgcatcttatttcagctcaaagaaaaaatcgctttttcattgtccgacagctcctatatagcgctcgtcgtccatctgacgtatgctatcgaacgaattaagcttggggaaactatcaccatggagcaaaatgagcttgaggaactgaagaatgcgaaggaatacagctccgctcttgaaatcgcgggcgagcttgaacgtgccttcggcgtgacgattccagaggcggaggtcggctatattacaatccaccttcgaagcgccaatcgaaaatacaaaacagaatacaaagcgcaggaaattgagctggaaacagccctgcaaacaaagcggctcattgcttttatttcagacaaaatcagaatggatctgacgaaaaactactctttatatgaaggcttgattgcccatttggagccggccgtcagccgcataaaagaaaatattgagatatacaatccgatgaaggaacagatcaagcgcgattattttctgctttatatggcgatcgaagaaggtgtcgaaaagtattttccgggcatgtccttttctgatgatgaaatcgcttttatcgttcttcactttggctcggctcttgaaatcaaaaaagaagaagcaaaagtgaaagcgcttgtcgtctgctcaagcgggatcggctcctcgaaaatgcttgcctccagactgaaaaaagagctgccggaaattgaatcgtttgatatgtcatccctgatcgagctaaaggggaaggatgttcaagcctatgatatgattgtgtccactgtaccgattccttatgaaaacattgattacatcatggtcagcccgctattaaatgaggaagacgcaaaccaggtcaagcagtatatcaagcggaagattccccttattcttaacaaaaaaagaagcccgaaggaagaggcgcagcaagctgatgtacctgacatgctagaggcggcggaaagcataggccggtatatggaagttatccaagatgttctgcgccattttacgctagctcaactcaaaacaaacccggaccatagcatgcttctgctagagctttttcaacagctgaagaaggatggcctgatccgtgatccggaaaaagccgcggtttgcctggctgagcgggagaaacaagggggattgggaatccccggaacaaacatggcgctttatcatctcaaaaatgatgaaatcgtcctgccttttttcaaaatgtttgatctcagcacctcctatgaagtggatggcatggacggaaataccctcaggatgacacgcattctcgtcatgatggcgcctagctcattatctgctgaaggctcggagattttaagcgcgatcagctcggcaattatcgagagcagagaaagcatggcggggtttcaggaagaaggagaacaagaattgtatcagcggttaaaccgcatatttttcacatggatgaaagaaaaaaacatactgtaaacctgcatggcacacgtcaaaaatttggcgtgtgtttttctgtggatggggaacaaaataagaaaatgtgggactattttatcattcagtattggaataattccaaaatgaaatagttttacaagttatcttttttgggttaaaatgggtgaggcaaggaagaaaatctaacaaattattgaagattcaagagaatataggagatgacgatatggaaacattacagcatctgattctgcatgacatgccgaatagcgaagaaatagaggctgtaaaaagcggagaccatacactgacatataaaggttaccgtaaacggattaatcagctggcgaatgccatgcttcaaaaaggaattcaaaagggcgaccgtgttgcattgctttgcaaaaacggccatcccgcatcaactgttatgttcgccgcgcttgaaataggtgctgttgtcgtacctgtcagctggcagctgaaaccatatgaaatgacaggcattttaaaagcaagtgaaccgaaagcgatgttttacggagcggagtttaaagagatactggatgaagttctacctgaattgtcctcactgtgtgtaacaatggaaacaggaacagcttacgaaacatctgctgaatttgaagcgctgtttgcaggtcctgatcatttgccagagacggaaatggtttcacctgatgatacagcacttctgatgtttacatctggaacaacgggaaacccgaaaagatgcatgattacacatggcggcatatacagatacgttaaaaaatccaacagctcaatagcacgtatgaagggccttcgttttctcgcgtgccatccgatttatcatacgagtgcgctcatttgcatcatgcttggaacgtttgcagaaacaacctttgtgtttacaaaggatcaagatcctgttcacatgctgaaggtcattgaagaagagaaaattcagaccgtgatggctcttcctgtgttttacacgtatttgcttgaggcgtgggaaacgcaccaaactgacttatcttcacttgttattttaatgacaggcggaacaaaagtgccgagcagcctaatccgccgctatcttgatattggcattccgctcgcgcatggctatggaagcactgaggcttggggcatcagcacatggacgcctgatatgggaatggataaagcggcatctgcaggaaaacctgtggcaggtgttaaagtcaaagtggaagatcctctgaccggagaagaacttcctcaaggagaaatcggcgaaatcgttgttcatactccattcttatttaaaggctatgaagacaatcctgaagcaacagcgaaagtgctgcaaaatggatggtttagaaccggagattcaggatatgtagatgaagatggctttattttcatcacgggacgctacaaggatgtcattatttacggaggcgataacgtctatcctgatcaggttgaagaagttatccagcagatcccgggaatccttgaaacggctgtggtcggtattccagacccgctttacggtgaaaaaccgaaagcttttatcgtgaaaaatggcggccagcgcatcacagaagaggatgtcatcgcattttgtaaagaacgcctgtccgcttacaaaatacctgaagttgaatttgttaacgaactgccgaaaaacaaccttggcaaggtgaaaaaagacgtcctgcgcaatcaggctgtacattcataaaagaagaagcccgtccactttatgtggcgggcttctttgcacttgcacagacggaaagctcaggcttaatgttcttaaattgtatatcaatgtcttcgaagccggctgctttaaagtcagcaatcatctgtcttccaaatgatttggttttttcaggactggcatccgcttcccgcggctgcatcgtaatggctgctttgccgcctggctttaatgcccgataaatctgtttcatgccttttgtttggtcattccaaatggtgtagttgttaacggaaatcactttatcataaaacgaggcggggagaggaaatgtctcgatgcttccttgtatcaggcgtacgccctttggtttcactctgcgggcggccagcttcagcatggcctctgacacatcaatcccatgaagatgaacatccttctcgcgtttcagcatctgctgcatgcagtatcccgggccaaacccgacttctaaaatgctgtccccgcgcgtgatacccagctgattgattgtccactgattcagtgtttgattttcagcagccatgatgtacccggcaatcatgccgatgacgccctttggcctgctgaatcttctagaaagcatgttaatcattcagcaaccaaccccctttttgagttaatttcctcccagcgttccatgtgaaacatttttctgataaagcaatgcgaaggtgccaagccatgtttatccatagagtgtgtgaggtacacaacaaatagacatgaaaacaaaggaggagaatcatcatggcaaattatccaaaagaactgccggcacaaactcaaagtcgccagccgggaattgaaagcgaaatgaatccaagtccggtgtatgagtacgaggattataaaggagcagacaaattaaaaggaaaagtagctcttattacaggcggcgacagcgggatcggacgcgcggtttccgtcgcttacgcaaaggaaggcgcagacatcgccattgtgtataaggatgagcatgaagacgctgagaagacgaagaaacgtgttgaacaagaaggcgtaaaatgcctgctgattgctggtgacgtaggtgaagaggaattctgcaatgaagcggttgaaaaaacggtcaaggaactaggcggccttgacatccttgtcaacaatgcaggtgaacagcatccgaaggaaagcatcaaagatattacgagcgaacagcttcaccgcacattcaaaacaaatttttattctcaattttatttgactaaaaaagcaattgattacctgaaaccgggcagcgccatcatcaatacgacatccatcaacccgtacgtagggaacccgacactgattgattatacagcgacaaaaggggcgatcaacgcctttacaagaacaatggcgcaggcgcttgttaaagacggcatccgtgtaaatgcagtcgcgccgggtccaatctggacgccactaatcccagctacgttccctgaagaaacagttgctcaatttgggcaggatacgccgatgggccgtcctggacagcctgttgagcacgtcggctgttatgtgctcctggcatcagatgagtcctcttacatgacaggacagaccctgcatgtcaacggcggaaactttgtgacgacataagagggagtgagacatatgagcatcacgaaagaagaagtgaacagctactatcaaaaagcagggattgtattaacggacgaggaagtagaccaaatccagctgatggattacggcttaggaaaagaaagaaaagtcgggctccagctcttcgtctacgtcaatacagaccgttattgttcaaaggaattggtgctgtttccgggacagacttgcccggaacaccgccatccgccggtcgacggccaggaaggcaagcaggagaccttccgctgccgctacggaaaagtgtatctttacgtagaaggagaaaaaacgccgcttccaaaagttctccctcctcaggaagacagagaacactatacggtctggcacgaaattgagctagaaccgggcgggcaatacacgattccaccaaacacaaagcattggttccaggccggggaagaaggtgccgtcgtgacggaaatgtcatcgacgagtacggataaacatgatatctttaccgatccaagaatataaggatgggcttaacagcccatcctttttgtattgaaaaaaacagaatcatcgctataatggttaaaaaaggaaagagggcgaggcaatgttcacttgcaaggtaaatgagcacatcaccatccgattattggagccgaaggatgcggagcggctggccgaactcattatccaaaatcagcagcggcttggcaagtggctgttttttgcggaaaatccaagcagcgctgacacgtaccgagaaacaatcattccagattggcggcgccagtatgccgacctgaacggcattgaggcgggtctcctttatgacggcagcttatgcggcatgatcagcctgcataaccttgatcaagtgaatcgtaaggcggaaatcggatattggattgccaaagaatttgaagggaaaggcattattacagctgcctgccgaaaactcattacgtatgcttttgaagagcttgagctgaatcgtgtggcgatctgtgcggctgtcggaaacgaaaaaagcagagcggttccggagcggctcgggtttctagaggaaggcagggcacgggacggcttatacgtaaacggcatgcatcacgacctcgtctactacagtctgttaaagcgtgaatgggaaggcgaaaaataaagagcacactttcttgtttaaatcttccccggatgtggaaaagtaacagcggagacgttaaaaaggagtgattcgagatgaatcagcaagacattaaacaaaaagtgcttgatgttctagatcaccataaagtaggttcgctcgcaacagttcaaaagggcaaaccgcattcccgctacatgacttttttccatgacgggctgacgatttacacaccgacaagcaaggaaactcataaagcagaagaaattgagaacaaccccaatgtccacattttattaggctatgattgtgaaggttttggcgacgcatatgtcgaagttgccggaaaagccaaaatcaacaattcggcagaactcaaggacaaaatatggagttccaaattagagcgctggtttgacggcaaggatgatccgaatctggtgattcttgaaattgaaccggaggatatcagattaatgaatgccggagagaaaacaccggtctcactcgaactataaaaaatttgtgttttcaggggcgatatgttattatgaatagctagtaagaaaaataagcaaataaaaaagaaagtaaacttcttttttctgttttgagagagaagcttaccgcttcccaagcagcataaccagctgcccttattcttttccttcataacaaatcgcccctaacgatgagatggaaaaaagacttttttgttttacaattcacaccggcgcggcttcggagccgcagtgacgattgagaggtagggctttcgttgtcttgtgttcaagaaatttccatggtgtttactttccagaatgattcttcggaacaatgctttatgaatctaacccgcctgacttggcggatgatataatctttatttgcgtatagaaaagaataagacaaaccgcccggcgtacgccggacggtttttttattgcaaaaaacacatcgtactgaaacctccttgtcttctttccagtcttatctctaggatgaaattggaggaagaataacgtgcatgtcattacaacacaagtactttttattttttgttttttattgctgattcactcgatagaaaccttagcctatgctacaaggctttccggggcccgcgttggatttattgcgtccgcgctttctctgtttaatgtcatggtcatcgtatccagaatgtcgaacatggtgcagcagccctttactgggcatttaattgatgctgctggaaaaaacgcactggcgattgtaggggagcagttccgctttttaattttcggatcgacagtcggcaccattttgggcattatcctgctcccgtcttttgtcgctcttttttcacgggcgattattcacttggcgggcggcggcggctccgtttttcaagtattccgaaagggattctcgaaacaaggattcaaaaatgccctttcctatttgcgtctgccgtccatttcatatgtaaaaggatttcatatgcgcttgattccgaagcgtttgtttgtcatcaacatgctgatcacatcgatttatacgattggcgtgctttcggctttatacgcaggccttctggcgccggagcgcagcacgacagccgtcatggcttcgggtttgatcaacggaattgcgacgatgctgctggccatttttgttgatcctaaagtatccgttctagctgatgatgtggcaaaaggaaaacgaagctatctctatttaaaatggacctctatcacaatggtcacatcaagggtggcgggcacactcctcgcccagctcatatttattccgggggcctactatatcgcgtggctgacaaagtggttttaataagaaaggctggatcataaagatccagccttttttgcattcccttatttatatttccttaatccgcggtcgtacaaaaaatttccgaatgggacgaaagcagcgacgaagccggcagctgaccatttcagcggccatttgacagagaaggttgcataagccaagacaagcaaatacaaaatgaacaacccgccgtgaaccgaaccgacaattgtcaccgcaagcggaaggcctgcccaatatttaagcggcatagcgatgaacaacaggattaagagtgacattccttcaataaaacccatcgtgcgaagtcttccgatcggcgtgtgcagcataaatcgccctccttgtggacacgttttcattttatactataaacaatccggaggggcatatgacagctttcaaaaaatgttcggaaaacattcatttttacatgccttttctagggaactgtacttgtcatttacaaaaatacccgagataatgtgtacaaaatcaaaaaagaaggatgttgaaatgaaacttgaccagattgatctgaatatcattgaggagctgaagaaggacagccgtttgtcgatgagggaattaggcagaaaaattaagctgtcgcctccatctgtgacagaacgggtaaggcagcttgaatcgtttggcatcatcaagcaatacacgctggaggtcgaccagaaaaaacttgggcttcccgtttcctgtattgtggaagcaaccgttaaaaacgcggattacgagcggttcaaaagctatattcaaacattgccgaatattgaattttgctaccggattgcaggtgcagcctgctatatgctgaaaatcaatgccgaaagcctcgaagcggtagaagatttcattaacaaaacatcgccctacgcgcaaaccgtcactcacgttattttctcagaaattgacacgaaaaacgggcgcggttagagagtgccgcgtgaagtctgttataataacaggatgagcgcgaaagaaagagaagtgatcaagcatgtcaaaaacagttgtattagctgaaaaaccttcagtcggccgggatttagcccgggtgctgaagtgccataaaaaaggaaacggttatctcgaaggcgatcaatatattgtgacctgggctttaggccatttggtgacgcttgctgatccggaaggctacggaaaagaatttcaatcatggcgcctagaggatctgccgattattccagaacccttgaagcttgtggtgataaaaaaaaccggaaagcagttcaatgcagtcaaatcccagcttacccgtaaagacgtcaatcagattgtcatcgcgactgacgcaggccgggaaggtgagcttgttgcgcgctggatcattgagaaagcgaatgtccgaaaaccaatcaagcggctgtggatttcatctgtgacggataaagcgatcaaggaaggttttcaaaagctgcgcagcggcaaagaatatgaaaacctgtaccattctgccgtcgccagagcggaagcggattggcttgtggggatcaacgccacccgtgcacttaccacaaaattcaatgcccagctctcatgcgggcgtgtgcagactccgacgcttgccatgattgcaaagcgcgaggcagacattcaggcgtttacgcccgttccgtattacggcatccgtgctgcagtcgacggcatgacgctgacgtggcaggataagaaatcaaagcagacgagaacgttcaatcaagatgtaacaagccgtttgctaaaaaatctccaaggaaagcaagcggtcgtagctgagctgaaaaaaacagcgaaaaaaagctttgcgcctgcgctttatgatttaacggagctgcagcgtgacgcccacaagcgcttcggtttttctgctaaagaaacgctttctgtactgcagaagctatatgagcagcataagctcgtcacatatccgcggacggactctagatttttatccagtgacatcgtcccgacgttaaaagaccgtctggaaggcatggaagtaaaaccgtatgcccaatatgtcagccaaattaaaaaacgcggcattaaatctcataaaggatatgtcaatgacgcgaaggtgtcagaccaccacgcgattatcccgaccgaagagccgctcgttctcagcagtctgagtgataaagaacgaaagctgtatgacctgattgcgaaacgtttcctggctgtattaatgcctgcattcgaatatgaggaaacaaaggtcatcgcagaaatcggcggagaaacctttacggcgaaaggcaaaaccgtgcagtcgcaagggtggaaagccgtttatgatatggcggatgaggatgatgagcaggaggatgacagagatcagacacttcctgcgcttcaaaaaggcgacacacttgccgtccgcacgttaacggaaacaagcggccaaacgaagccgcctgcccgctttaatgaaggaaccttgctgtcagcgatggaaaacccaagcgcgtttatgcagggagaagaaaaaggcctcgtcaaaacgcttggagaaacaggcggcctcggcacggtggcaacgcgtgccgacattattgaaaaactgttcaacagctttttaatcgagaaaaaaaaccaagatatttttatcacttctaaaggaaaacagctcctgcagcttgttccggaggatctgaaatcaccggccttaacagcagaatgggagcaaaagctgtctgcgatcgcggccggcaaattgaaatcggctgtttttattaaagatatgaaggcttacgctcaccaaacggtaaaagaaatcaaaaacagcagccaaaccttccgacatgacaacattacgggaacggcatgtccggaatgcggcaaaatgatgctgaaagtaaacggcaaacgcgggacgatgctcgtgtgccaagatcgtgaatgcggaagcagaaaaacgattgcccgaaaaacaaacgcacgctgcccgaactgccataaaagaatggagcttcgcggccaaggcgagggccaaacctttgcgtgtgtgtgcggtcaccgtgaaaagctctctgtatttgaaaaacgaaaaaacaaagacaaagcgcgtgctaccaaacgggacgtatcctcttatatgaaaaaacaaaataaagatgagccgattaacaacgcgctggcagaacagctgaaaaaactcggtttggataaataataaaaaaacctgtgcctatcgcacaggttttttattggacttaggtcctgttttcttaatgttcaaaaaggggaaaaaaagctagcaatctgcatttttttcttttatagtaaatgtactttgtaacatggcagtcatattttcgtctataactatttgtgagcgtctgatttgcttcaggcgacaaagggggatttgcctgtgaggcatgtactaattgctgtcatcttattcttcttatctatcggactttccgcagggtgtgctgaagctggaaacaagacccaaaatcagtcggcgacagaagtgaatgccagcccgctccagccggcggaatatttcatctatcacaatttaatgaatgacaaagggctgatcaaaaccgatttttcagaccagccttcttacttgtcggaatctctcggactgtggatggagtttctgctcagcaaaaatgacgcaccacatttccaggatcaatatcagcatctgactgattcatttctgatgagcaatcacttggtgacgtggaagattcaaaatggccaagcgagcgggacgaatgcgctgatagatgatatgagaattatgctgtctcttgaccaagccgccgcaaaatggggccgcagcgactacgcgcaaacggctagggatatcggcacgtctttgaagacatacaatatgaacaacgggttttttacagacttttacgactcacaggccgcttcaaaggatgtgacgctttcatacgtcatgcctgatgccttagctgtcttaaagaagaatggaatcatagacgaagaaacagaacagcggaatgccaatgttctctattcagctcctttaaaaaatggctttctgccgaagacatacagctcggagacgaaggaatacacatatgatagtgaaatcaacctgattgatcagctttacgctgcttggcatttgccggaaggggatgaaaaagcatctgttttagcggactggatcaagcaggaatttcagaaaaacggaaagctgtacgggcggtattcggcagatacgaaggagcctgccgtccaatatgagtctccatccgtatatgccttagccgtattgtttttgacaaaacagcatgaaaacagttctgtcatcaaagccatatatgacagaatgaatgactttgaaattcatgatccggtgaaatcgtattatggaggctatatgagcggcactcagacgcattcatttgacaatctgctgccgctgttagccgaaaggaagctttttaatgaaaatatcattcagtgaatcacaaaaattatttgcttatttttcagggctcatcgcggccctgtctttgtttatttattatgtgtcagcccagcaatcagaaggtgctctgatccttttcatcacatttggcgtcatcgccgcaggcatctggttcggcccgatttacgcgctggcagtgaccttaatcgtactctttgttctcggcaccttaatgatgtttttccagactggacagacatcgctctttccggctgaggaagggctgcgaatgcttgtcgtgtggggaatcgcgcttttgctgttttcttttatttctggaagaatccacgatattacagcagagcttcggcgctcaataacacggcttcaatccgaaatcaaaagctatgttgctgttgacagagtgactggttttgataacaagcaaaggatgaatctggaactttcagaagaaatcaagcgggcggagcgctacggcaattcttttgtgtttttgctgctccatatgcattatttcaaagagtttaagtctttgtacggtgaaaaagaaacggaccgcctcttccaatatgtcggtcagcaaatcaggacaagcgttcgggaaacggataagaaattccgtccctctgacgagcgtatcgggatcgtgctgacgcacacgcctgctgaacatatgccggccgttctgaccaagctgaagaaacaattggatacatatcagctggaaaatggaaagtatgtgtcgcttacgttccacgtttgctatttgccctaccgcaacgatatcaaaacagctgatcaatttttagaagaactggaaaacgagatgatgatgaatgaactataaaggaatcacattgctatgcgtcatgatgcttctttttttagctattgcgtcttttcccgtttctgcgcaagcgaaagatcaggatgccggcattctcatcatctactcaaccttggacggcaaagagtcgtcacaagtcaaaatgctcgatttgcttgcgggccactttacatcccatgtgacagtcaaaaaagattcagacgttgaagcgtcggatctcaaagggaaagaccatgtgatttattacggccaaacgaaaagaaagctcagcaaaaaattgctgtctcttatcagcggcgtaaaaaaaccggttgtcgccattggctataacgcaggccaaatcagccaattttccggtctttcattagcccgcaaagaaaatgtgtttcaggttcacagcaggtcggaaaaggccgatgtgtctctggaaagcgggcttaacgtgctgagtgtatcaggcctgaaaggaacggcgctttacaccttcaaagccgatgacggcacaacgcattcttttatatggaaaacaaaaaaagggaatgtgtacattggattaacaaatttgttaaatgacaatttgatcgtggcgaaacagctcagagaagctttcggagagaaggcggggacgacgttattgtatttgcgtctcgaggatatcagcccgatgtctgatgaaaaattgctgcttcaagccggtacatacctgcataagcggcatattccttttatcctggcggtcattccggtttatttgaatccggaaacaggcgacaaagtgtatttgtctgatcaaccgaagatggtcaaggtgctgaagaagctgcaaagcatgggcggcagtatcattgttcacggctatactcacgcttatcgctacagtgaaacaggagagggctttgaattttgggatgcaaaggcggatcagccgattacatccggaaatgccgaagaccccccgtccattttggagaaagaacaggacttcccgaacgaacaagcctatcacagctatctcgaaccatttcgggaaaaggaagaaacgtatacaaaacaaaaactgacgcgtgccattgaggatttgacatcatcgggtctttacccgctggcgtttgaagcgccgcattacacgatgtccgaatatggctatcaaatcgcctcgcagtattttacaagcattttcggccaggtccagctcagcagcacaacatggaaaacatccggtgcacctccgtttgtgactgctccttcgatgttgcacggaatgacgctttatccggaaacgatcggctttgtcgacacatcgaagcaaaactcgctcggtgagatggaggagcacatctcccagatgattgattttgaaggcggagtagccggaggattttatcacccgtacctcgggatgaaatatctgccggagctggttgatcagatggaacgcattccagacagtgaatggcttgatttaaagaaaacgaaacaaaccgtcaaaacagacaaagtggaaattcatacaagcggtgacggaacgattcaggtgaaaaacggcgtaagcgcgattgacgagtttttcgatcatcaccggcaaacccctctggaaaaggcgttatggattctctccgctgttgtgctcttatttgtcatcatgtttgtcagttatacgttttacttgagagccacattgaaaaaacgaatttttaaggagagaagaagccttgggtaatacgctgttctttatctcgctaagtttaatatgggttatgcttctctaccacatgttcctcatgcagggcgggtttcgccactatatgaccttcgaacggaatatcccgaagtggagagaaaatatgaaggaactgccgaaggtcagcgtcctcatcccggcgcataacgaagaggttgtgattcggcagacgctgaaggccatggtcaacctttattatccgaaggaccggctggagattatcgtcgttaatgataattcatcagaccggacgggtgatatcgtcaatgaattttccgagaaatacgatttcatcaaaatggtgattacgaagccgccaaatgcaggaaaaggaaaatcctctgcacttaactcgggttttgccgaatcgaacggcgatgtgatctgtgtgtatgacgccgacaacacgcctgagaaaatggctgtgtattaccttgtgctcggcctgatgaatgacgaaaaggcaggcgccgtggtagggaaattccgtgtcatcaatgcggcaaagacgctgctgacgaggtttattaatatcgaaacgatctgttttcagtggatggcccagggaggcagatggaagtggttcaaaatcgccacgatcccaggcaccaacttcgcgatccgcagaagcattatcgaaaagctcggaggctgggatgacaaagcgctcgctgaggatactgagctgaccatccgggtatataatctcggctatcacatccgctttttccctgccgccatcacgtgggagcaggaaccggaaacatggaaggtatggtggcgccagcgcacccgatgggcgcgcggcaatcaatatgtcgtgctcaaatttttggcgcagttttttaagctgaaacgaaaacaaattatctttgatttgttttattttttctttacgtacttcctgtttttctttggcgtgatcatgtcaaatgcgatttttgtagtgaatttgttttatgatttgcatttgtctgttggatttttggcaatgattctctggattttggcgtttttcttatttatgacagaggtcatgattacgttgagcattgaaaaaacagaaatgaacaagcaaaacttttttatcgtatttctcatgtacttcacatactcgcaggcatggattgtgcttgttatctactctttattcgtagaaatcaagcaccgtttattcaagcaagaggtcaaatggtacaagacagaacgatacaatcaacataaaagcgggtgacctttttgaaacaaataatgatttttctcacaagcttcatgctgctggcgatgactggacaaacggctcttgccaaagacgtacaggtcagcggttcgctcctcgggaaaagcagccaagaacaagccaaacagcaggtgctgacaagcgagttgattacactgtatggatcaaaagacagcgcagagctgacgtaccagatcccggcaggcgcctcttcgggcaatcagcaattggtaatcgaatacgaggcatcaaatcttttaatttctccatcatcgttaacggctgtcattgatgatgaaccggtcaagacgttaaagcttgatggtgattccaaacggaaaacagtgaagctgaatctgaataaaagccagtctgcgcaaggctatcacaacgtatcgctgaaattctacggcgtaatgaaagagggcgtgtgcgtcagacaggatacatcaggcaactggatcaaaatttatccggacagccggctgacacttgctgacagcagtgaagcgaagggaacgtcgctggaccattatccgtatcctttcgcccaatctggaaatacagcggaagaaacagctatcgtcattccggataacccaagttcagcagaaatagaagctgctgttaaaacagaaggctatttgaaaacggtggacagcagtgtcagtattgcgtatgtcacggaatctgaactgaaaaaaatcgataagccgacgattgttatcggcgtggacaagcattggaacggcaaagtgaaaaaactgttgaaacaagctgggctacaggcaaaaggagaaaaccttctgcttgcggagcgggtgctgaaagcagagggcaaacagcagccggttctgtttgcgcaagcggcgtccgaggacgcgctcactaaaaaaatcagcgtgatgacagatcagacatatacaggccagctcagcggcgatacactttcaatcagcaagcttcagcagactgaaaaaaaagaaagcgataagctgacccttgagaattttggagcgggtgatatcacaattggagccgacaaaacatcttcagcacattatttttatccggcttcggctgttttagatgaaaaccaatcggcgaagctgtcgcttaaactgaaaaagtctgaaacgattcaagcctcagcgactgaaaacgagtctgcctctcaggccgcagaactgaaagtgatgatcaacggccagccgcactcggtccgacttgatgaattaggaaaagaagataaaaacggattctatcatgtcacagtgaaagtggaccctaaactgctgcaaaaaaaccgctacattgatattcagttcgtcacgaccggcttaaaggaaaacaacccttgcaacaccactgatgaggaaaagtgggtttttatcgataaaaacagtacattatcatacgccatcaaaggcatgtctccgtcagcggattttcaagagtggccgcttccttacgccggaaaccaggatcaaacaacattaatcgtgcttcctgacaccgtaagccaatcgaagcttgaggagctttctctcgtaacggaatcctttggcagcgaagcacagcattcatatacagtaaagaaatcatctgacgttacagcaaaggatgcgaaaggacgaaacctcattttcataggagggatcaatcaattttctcttctgaaggagaaatcatcagatctgcttgtgccgcaggagaagaacggctcgtttgatgtatctggtttcgagatgctgaatgagacgacaaaacaagtggtatttacccaagcatcggtttgggattcacgctatacaatggcagtctttgcaccgtcaaaaggagatggaacggctgtcacaaaagagatcatcagttatctgaacagcaacgatgagtcggcaaccgtccttaatgaaacaaacagccagcaggtgtttacaaaccaccagcagctcaaatcggaaacaaacagttccgatgcagaacaaccaacacaggatcatagccagaaatggatgtatattggtgtgctggcactcattatggtggttgcggcagtgttcatttggattgccgtaagacgcagaaaaagaaagacagatacagaataaaacagaggctattttagcctctgtttttttatttttggtaagtaaattccatttgtggaacctgtcattttatttttttctctcagccaataagcctctttacaacgtgcgggaacgggagtatgatctcttttagaaaacaaatcgcttaatctgaaatcagagcgggggacccaatagaacggctttttgccgttggggtgaatcctttttaggtagggctaactctcatatgcccgaatccgtcagctaacctcgtaagcgttcgtgagaggagatgaatgaaacctgtgttcgatgttatggcacaggggcatccgtttgcctctgtgttttttgttgttcatttttgaatgcaaatcgcatacagagacatcatagcagaaaggactatcatcaacatgtgagagcaagacactgatggatgttttattgttttaattgaaaaatgagaaattaaaaggggaagacatcgatgtatcattcaatcaaacgttttttgattgggaaaccactaaaatcccaagcagctggagagcaaaaactgacgaaattaaaagccttggctatgctttcctcagatgcgctatcatctgtcgcatatgggacagaacaaattctaatcattttggcaacaatcagtgctgccgcattttggtactccattccgattgcggtgggcgttctcatcttgctgctcgcactgattctttcatacaggcaaattatttacgcttatccgcagggcggcggggcgtatatcgtttctaaagaaaatctcggtgaaaaaccgggattgattgcgggcggttcattgcttgttgattatattttaacagtagcggtaagtatttccgcaggcacggacgccatcacgtcagcctttcctgtattgcatgattatcatgtgccgatcgctatttttctcgtgttagtgattatgattttgaacctgcgcgggctttcggaatcggcatccattcttgcctaccctgtttatctgtttgtggtggcgcttttggttctcattgcagtcgggttgtttaaacttatgacaggacaaatagaccagccagcccatcatacaccgctcggcacacctgtagccggcattacgctgtttttgctgcttaaggctttttcctccggctgctcagcgttgaccggggttgaggccatttctaatgcgattcctgcattcaaaaacccgcctgcgcgaaacgcggcaagaacgcttgcgatgatggggattttgctggcgattctgttttccggcatcacggtgctcgcgtacgggtatggtacggcgccgaagcctgatgaaacagtggtttcacaaattgcgtccgaaaccttcgggcggaatgtgttctactatgtcatccaaggtgtcacatcgcttattttggttcttgcggcaaatacgggattttcagccttcccgcagcttgccttcaacctggcgagagaccagtatatgccgcgaatgtttacagtcaggggcgaccgcctaggcttctcaaatgggattatctttttaggcgttgcttccattgtgctcatcctgttattcgggggacagacagagcacttaattccgttatatgctgtcggcgtatttattccatttacgctttcgcaaaccggcatgtgcatcaaatggatcaagcaaaaaccaaagggctggatcggaaaaatgctgatcaactcttgcggcgctttgatttcgtttatggttctgtcgatcctgtttgtgacgaagtttaatgttgtatggcctgttttaatctttatgcctatcgtcgttctgttgttttttgcgattaaaaatcactacaccgctgtcggcgaacagcttcgcatcgtagacaaagagccggaagaaatcaaaggcaccgttgtgattgtgcctgtggccggtgtcaccaccgtcgtacaaaaatcgattcactatgcgaaatcactgtccgatcaggtgatcgccgttcacgtgtcatttgacagagaacaggaaaagaaattcgaaaaacgctgggaagagcttaataacggcgtgcgtctcgttacgcttcactcctcgtatagaagccttgtccatccgtttgataagtttttggaaacagttgaggcgaaagcgaagaaggagcagttttccgttatggtgctgtttccgcaatttataacgaaaaaacgctggcacaccatccttcacaaccaatcagccttcctcctcagagtccggctgttctggaaaaaggacataatggttgccacactgccgtatcattttaaaaagtaaagctctaggaccaagggaatcaccttggtccttttttgcggaaaaaggaggtatggcggtgtatacacaaggtgcttttgtgatcgtactgaacgaaagtcagcaggttctgctggtgaaacgaaaagatgtccctttatgggatttgccgggcggcagggttgatcccggggaatcggctgaggaagcggcagtgcgggaggtattggaagaaacgggatacaatgcagcgctttctgcgaaaataggtgtttaccaaaggccaaagtttcaagatgaacagcatctgtttttcggaagcataacaggcggacaagcagtggctgacggcacagagacagcgggattaaagtgggtttccccggagcgtttgccgctttttatggtgccgaaccgaaaaaggcagatcaatgatttcaagaatggcgctcaagatgtaaatgtcaccgtcaaggatagagggttgctcgcggcgatcgacctgttgaaaagaagactgggcaagtgattcaggtctccgggttttaaagcctttctcctgtggtattgaaaaaaggaaaaaggaggatacgttatggcacacaaaactgcaggacaagcaatgacagagctgcttgagcaatggggagttgatcatgtatacggcatccccggagacagtataaatgagtttattgaagaattaagacacgaaagaaatcaactgaagttcattcaaactcgccacgaagaggtagcggcactggcagccgcagctgaagcaaaactcaccggcaagatcggagtctgtctgtcaatcgcagggccgggagcggtgcacttattaaatggtttatatgatgcaaaagcggacggcgcccctgtgctggcgattgcaggacaggtttcttctggcgaagtcggacgggactatttccaggagattaagctggagcaaatgtttgaggacgtggctgtgttcaacagagaggtacatagcgcagaatcacttccggatctcttaaatcaggcgatcaggaccgcctacagcaaaaaaggcgttgcggtattgagcgtgtcagatgatttgtttgcggagaaaatcaaacgggagcccgtgtatacttcaccggtgtatattgaagggaaccttgaaccgaaaaaagaacagctcgtcacctgcgcccaatatattaataacgctaagaagccgattatcctggcagggcagggaatgaaaaaggcgaaacgggagctcttagaatttgcggacaaagccgccgctccgatcgttgttacactcccggcaaagggtgttgttcccgataagcacccgcattttctcggcaacctcggtcagatcggaacaaagccggcttacgaggcaatggaggaatgtgatttattaatcatgctcggaacgtcattcccgtaccgtgattatttgccagatgacacgccggcgatacagctcgattcagacccggcaaaaatcgggccttgtctgcgattcggctctcggtctgcgcgaattgacagagtatattgaacgcaaggaagacagaagattcctaaatgcctgcacagaacatatgcagcattggtggaacgaaattgaaaaagatgagacagaggccacaacaccgcttaaacctcagcaggtcgtggcccgtcttcaggaagcggcagccgatgatgcggtgctctctgtcgatgtcggcactgtgacagtctggatggcgcgtcatttcaaaatgaacgcgaatcaggatttcatcgtctccagctggcttgcgacaatgggttgcggcctgccgggagcgatcgccgcaagcttgtccgaaccggaacgccaggcgatcgctgtctgtggtgacgggggattttccatggtcatgcaggatcttccgaccgctgtcaaatataagctcccgatcacagtcgtcattttaaacaacgaaaatcttggcatgattgagtacgagcagcaggtcaaaggcaatatcgactatgtcacaaaacttcaaaatgtcgactatgccgcatttgcagaaagctgcggagcaaagggcatcaaagtgactaaagcgggagagcttgcgccggcattccatgaggcgctgcaatctgaccaaccggtcgtagtggatgtcatgattggaaacgaaccgccgcttcctggcaaaatcacctacgggcaggcgaaaggctttagcaagtacatgctgaaaaacttcttcgaaaaccaaaaatttgaaatgccgtcactgaagaaaagtttgaaacggttattttagaggcccttttagaggcctctttttttgtgttggaaacaaatgtatttcaggttatccttgtattatattggtatgaggaggattacatgtttgagttcataaaattattgttgtatgtattaggatctgcaggaatgatctatgcgtcatatcacgattttcgccatgctcagaacgggcaaaaggacaaatgcatcttctttcaaagcaaaaagaccagcgcatttgtccttgtatgtttcatttgtttattcttatcaaatctaacagagctcttctcagtatagggttatttctcttttttcttcagcccgaagaagaaaggaaaagcagaaccgaccaagaaggtgccgaataaaaacatgccgccgataaacacgtggaaatttgtgtgtccggccgtaaacgccgtgattagggaaataatactgagcacgatcatggcaatgccgggcgcgactctcatttttcccttggatttatgggcagcaacagaacataaaatgccgataacaataggaacaatccacaaataaaacagaataaatactgacatcatcaaaactccgatttttcttctatcataacaaatttctgtcaaaaagggtatcaaagagcttttgcgaaaaaataaaaaccggctttagaagccggtttttttatcgaaacgtatctacaattaaaaacacattcaaagcaacgatcaatacagcaatcagccaagacaccactgtgacccatttggcgttgatcagagatcccatgatccgtttattgcttgtaaacataataagcggaatgagggcaaaggcgatcccgaaggacagcacgacctggctcagtacgagagcggtcgtcggattaacacctgacgcgatgatcaagatcggcggaatgatcgtgataaaacgccgtacatacagcggaatgcggtagttgataaatccttgcataatcacgtcgcctgaaagtgtgccgacagacgaactggatagaccggcaacgagcagcccgatcccgaataaagccgcagacatagggctgacaagatgtccgaattgctgaaatgcgacgtcgagatcctcaacaaacaggccgtttttgaagaataatgcggcagccacaatcagcatacttgcattaatagcccctgcaatcagcatcgctattaaaatatcaataaattcaaacctaaagatttttttccgttctgcatcagttttgccaaccacccgccgctgtgtaagggcagagtgtaaataaatggcgtgcggcataacagttgcgccaagaatacccgctgcaagaagcacactgtcggtgccatgaaacgccgggacaaaaaggcccttcatcactgacacggcatcaggctttgcgaaaaaggtctgcagcgcaaaggcgatcacgaccacaaacagcatgccggcaataccggcttcaagtgagcgataaccgcggcgctgaagctccaatatcgcgaaagaaccgatcgccgcaataatagacgcttcaagcatcggaatgccgaacagcaaatacagtcccagagccgctccgataaattccgccaggtcagttgcgataatgacaagctcgccctgaatccataatccgatcgagacaggcttcgggaattcttcacgggcaacctcaggcagatttttgcctgtcgcaataccgagtttggcggatagggattgaattaaaagggccatgatattagaaaataagatcacccataagagcatatatccgtatttagaacccgccgaaatattcgttgcgaagttgccgggatcaatataggcaatggctgctataaatgcagggccgagaaaagggagcagccctctgaatcctctgattttcccgtcaagcgcatcttggacggctttggaacggggagattgtgctgtgatgtccttgttcatcatgtctcacctgaattctgtttgtttttgccgtacaacaaagagtttccttaaggcaaattattttatctacatcatatgaccatcccggtttcttgtcaaccgaaaatgttcaaaatacacttctgaatttttccctgttatgtaacatgatatgtaggaattcgggataaggtcccatataaaaagacatcgtttcagttcgaaacgatgcctcctgtatctaatgagtctaggcttccttccgcagcccgcggaatataaggcccagcaagaacacgaagatggctgccccgatgatggccgggaaaatagcaaagccggcgaggctcggtccccatgtgccaagaagtccgtgcccaatccaagcgccgatcagcccggcaatcatagagccgaaaattcctcccggcagccggtttcctacaatggcgctcccaattaatccgataacaattgcaacaactaatgaaaccaaaaagctaagcatcatgatcacctctcataaatgatttaccaatcaataaccgctcctgatcatttcgaaacacttaaaagcatattcctttatgatcctgttttaatctttctctgcacactgccgtcagctaaatgaacaatgacctcagtgcctttatgcgccgcgatttcctttgcccgttcaatcgcttctttctttgtatctttgatttcagacacacgtttggcgccctcggctttgactgcccagccttttttatgcttaataacatgctctgctttattcatgagctcggggccgctgccgctgcttggatcagcatcgcgttctgtctcatcatcatgcgtcaggaaatcatcaatttcatctgtagaggcgttttccgcccattccttcgctttgcttgtcgcaattggaatcgcgcgcccttcctcatagccttcatcaatcatcgcattcgcaatgtctatcgccttttttctcaccggcttctcaagattttttaatgaagcaggataatccttcatcgaccaaggcatgtccatcactccttttccttttataaaaatggtacccgcaggtgaaaaataaaaacgcatccgaaaaaatgaaggtatactatatagtagaaaaaacggaagggaagtgcggattgggtgccaacagaacgaaaagaagacttacatcagcaattaaaagagatagagaaatgggaaaaagatcagcaaaaagtctggttttgggaaaagctcagccgtctcccgtttcaactcctggacaagctgacaccagaattcatccagaaaaagatcggcaagctcttggatgaggtcggcagctttgttcaaacaggcggacagtacctgacatctgaaaaacagattatcaggatatttcaaaagaaactgccggaggagatctttgaatcgctggaggacatccggaaggcgcctctttctgtcatggatgaaattgcggaaggaatgggcaaaaatagaaccaacgcagcaaccgttcaaggcgcgacaaccggtgtgggcggcgtgtttacgctggcggcagacattccggcagtgcttggcttatcactaaaaacattacaggatatcgcagtcgcatacggctatgacccaaaggagaaaaaagaacgagtcttcattgtgaaatgcctgcagcttacgtcggctgatgttgtcggcaaaagatcgattttgcaggaattaaaacactacgatcaagaccgtacatataagaatgtcgcttctcaaatccaaggctggcgagaagtcgttttgggctatcgagacacgtttggctggaaaaaacttttccagatggtgccggttgccggaatggtttttggcgccgctgccaatcgctcaacattaaacgacattaccgagacaggcatgatgctgtacaaaaagaggcgcattcttgaacgactgaaagaaacagaacgagagatggaatagcagaaagcagacggacaccgcgatccgcctgctttttttagtggaaacatacccaatgtgttttgtttgtttaaaagaattgtgagcgggaatacaacaaccaacaccaattaaaggaggaattcaaaatggcagacaataacaaaatgagcagagaagaagcaggtagaaaaggcggagaaacaacaagcaagaaccatgacaaagaattctatcaagagattggtcaaaaaggcggagaagccaccagcaaaaaccatgacaaagaattctatcaggaaatcggcgaaaaaggcggagaagccactagcaagaaccatgacaaagagttctatcaagaaatcggtgaaaaaggcggagaagccactagcgaaaatcatgacaaagaattctatcaagaaatcggccgaaaaggcggagaggcaacaagcaaaaatcatgataaagaattctaccaagaaattggctcaaaaggcggaaacgcccgcaacaacgactaatcaaaaacataaaggcagacaacctgtaaataaaaaagcgatccggcacatcagctggatcgcttttttttggaatcttctcaatttatgccactattgcgatacaataagtgaaaaaggggttttcgctaatgtccaagatgcaaaacttgctcgccatcgcaaatgaagtcaaagaaaagcacgccaatttttcaatctcagaggtcaacgaccactgcgtgcgccttgcggtgtttacgggagaatatgactggcaccatcaccctgactcagacgaattgtttattgttcttgaaggggagctgctgatcgattttaaggacaaagaaaccgcggtgctcaaagcaaatgacagcctgctgatcccgaaaggcacggttcaccgcacacgctcttacgtcagaacggtaaatctctgtgtggagcataaacaagccgaaaccgtcatcatagaggagcagccatgctaatcaaaaagatgatatgtgaagtagacgctgcaaacgctgaagcatttgcaaaagcgcagtcacagtgggaagcattatcgcatataagcggctttatcaaacaggccggcggctggcgaaaaacgatagacgagccgctcaccgcagaaatcatcagtgtatgggaaaacagagaagcctatgatcattttatggagaacgaacatgacagcatatacgaggaaaacgatcagaaggctgtaattctttcgatagaggtgacggtgtacgaagaggataaaccgttcgtttatgatctgttacataaccccgatatccggtacgaaccaaactggacggttctgaaggcataatcaaagcccaaaacatcatattttgggcttgtctctttactcgcgtcccggaagtgtattatgaacaaaaggcggtgctggttttaactccggtttttctccaaacgtttttgcttctttcacatattcaaaggcttctccgtccggcgctttttcattcagccagttttgctcggcgctttcttcgccttcagagaaattgataagctgatgtgagaactcttgtttttcgagcgctttcgggaatgtacccggcacaaccggaccttcctgtgcttctaattctttaatggcggcaagccattggttctggtgcattgtgtcacgcgccagcaggaagctgagcatatctttgacgcctttgtcatccgtcatttcaaacaggcgtgcgacctgcagacggccctgtgattctgcattcaggttggcgcggaagtctgccagcaggtttccgcttgctacgatataaccgccgctccaaggtacgcctgtactgctttccggcatggcgccaagtcctgatacaatcgcatggtgagggttcatgccgcctaggatggagccgatgaccggatcttcagcagctttttcctgctgatcaagaggggcattctcaagaagtctggcaatcatcgttgcgatcatttcaacatgcccgagctcctcagttgccgtatccatcagcaagtccttgtatttttcatttcctcttgtgttccagccttgaaataagtactgcatggcaactgaaatttctccgaattgcccgcctaaaatttcttgcatttttttagcgaataatggatctggacgatctggtttagcaggatgctgcagcatttttgtgtgcttaaacatgtacccatctcctttttcgattatctctttttatatttccgatcgatagaaagataaacgaaaaacagcgtatcgagatgggaactatgaatcttttcgcagctccaacagttcccggatcagctcccggccgaagatgggctcatactgccggtaaacagggtcaagacgcttcatccattcttgtttctctttatctgacagctcataaatatgtatagcagaattctttttgatttcttccagctgctccttgttcatttgttcggcatacgtttcattccactccgtcgtctccttcatcgcttcagtcaaaatgcgccttgtttctggtgtttgcgccttccagaagtgttcatcagtcatgacagcgtagccgagataaccgtggctgcttattgtcaaatagtcctgaacattataaaattttttagaatagatgtttgaaattgtattttcttcgccatcgactacattgttttctaacagctgaaaggtagaattgaaggattcctgatgaggtgttgcaccaagcagcttgaactgatcctcaatcacatcgctttgcataatgcgcagatgctgcccttttaaatcatccggtgttttgaccggcccttgatttgttgtgatttgcttaaagccgttcgtccaataggccagtccttttaattggtttttctttagagaatcaaacagctgtgtgccgatgcttccgttcagcccttttttggcggcgttgtaatctgtaaaagcatacggcagatcaagcactccccattcaggcgagagcatgccgagcttcgatgtggagggggcgataaattgaacatcgccgttttgcaatgcttcaatttcttcaatgtccgagtacaggcttccattgggaaatacttctatttttattttcccgcctgatttttcgttcaccagatcagcgaatttattggcggcaagcccttttggcgtattttcagcaaccacgtggctgaatttaaacacgatttgatcctgcaggccttcctggtcgtcatcataaacaatctttttattgcctgtatgatcatggaatccgataaataaagcggttgcaattccagcgatcatcagtgcgagacatgcaagcaaactcttcatgaaaagccctcccctatgttaaggataatgggggcaatgacattcgtaaagacctgaaaggagaagctgatgaacaaaaagaagctctcaatccgttggaaaatcacgatcttatcctatatactcgtcattttctcctttttgatcggcggcattgtgctcatcggcaacattcagcatacagaggagcgggagctgaaaaagcggctgatgaatacggcccggacggtgtcagagatgacagaagtgaaagaagccttggcgcgaaaaaaacaaacagaagctgttcgccatgcggttgaagaaatcaggatgattaatgaagcagactatattgtcgtcatggatatgaatcacatccgatatacgcatcctgtcagcacaagcatcggcaagaaatcagaaggtgcagacgaggaggcagcgtttgcggagcacatttatttctctgaagcaaagggcgagctcggcacggcggttcgcgctttttatccggttaaggatcaagacctgaaccaaataggcgtggtgcttgtcggaaaaacgctgccagggatcgctgacatcctgcttcatttaaagcgtgatatcgccttcatcgttgtgctgacactcggctttggccttgctggttcctttttgctggcccgccatatcaaaaaacaaatgtttcagcttgaaccccatgagattgtccgaatgtatgaagaacggacagcgacgtttcactcgatgaatgaaggggtgatcgctattgacaatcggctcgtcattacgatttttaatgaaaaagcgaaacagatctttgaagtgcagggggatctgatcggcaaggtgatttgggaggttctcaaggattcgcgcctgcctgaaatcgtggagcggaacaaagcggtttataatgaagaaattcgtgtcagcggaaaagtcatcatgagcagcagaattccgatcgtcatgaagaaaaaagtgatcggcgccgttgcgatttttcaggacagaacggaagcggccaagatggcagaggaattgactggtgtcagaaactttgtggaggcgctccgtgtccaaaaccatgagcatatgaataagctgcacacgatcgccggcctcatccagctggggaaatctgaaaaagccttgcagcttgcattccaggcgtcaactgagcaggaaaatgtgactgaatttctgcaccgctcgattcaaaatgacgctgcggcaggccttctattaagtaaaatcagaaggggaagagagctcggcattgctgttcatatagatgaaaacagcagtcttcagcaatttcccgagcatgttgatcagcatgatattgtcgtgcttttggggaatctgattgaaaatgccttcggctcatttgaaaccgttcaatctgaagacaaacgaattgacattagtatcgaacaaacagatgatatccttgctattttaatagaagataacggctgcggaattgatccggcacatatgcctcgcctttacgacaaaggttttacggtcaataaaactggcggcacaggctatggcctgtatctagtgaaacaaatcatagacaaaggatcgggcacgatagaagttgattcacatgcggggcaggggacatctttttctatcgtttttccaatgaagggggaggaagcacagcatggctcgtaaagaatggaaggttctgctcattgaagacgatccgatggttcaagaggtcaataaggatttcattacaactgttaaaggcgttactgtctgtgcaacggcaggaaacggagaggaaggcatgaagctgatcaaagaagaacagccggatctcgtcattctcgatgtgtacatgccgaaaaaagacggcatcaagaccttgcaggagatcagaaagcaaaagcttgaagtggatgtcattgtcgtctccgctgcaaaagacaaggaaacgatctcactcatgctgcaaaacggggcgattgactatatcttaaagccgtttaagcttgagcgaatgagacaggcgctcgaaaagtacaagcaatataaacaaaaaatcgaagcgaatgatacgctgtcccaggaacagctcgatgcgatcctgaatattccgcagcaggccgtacaggatctgccgaaagggttgaatcacttcacgatgaatgaagtcactgcttttttgaaacagcaaaccgcatccctttctgctgaagaggtcgccaaggcgcttggcatcgccagagtgacagccagacgatatcttgattacttagaaaaaaccgggatcatcaaattggacgttcaatacggcggagtcggccggccggtcaaccgctacgtgttaaaaggataaacctgagaccaaaaagaccaaaatgtccgttatgatcataaacttccccagacattatgaaaacgctatcattatagtaagaaagacacaaaaggcgaataggacagggggatgaaggatatgaaactgtttaaaaatttaacagttcaggtcataaccgcggtcatcatcggggtcattgtcgggctggtctggccggatgtcggcaaagaaatgaaaccgcttggcgatacatttatcaacgctgttaaaatggtgattgcaccaattattttcttcacaatcgttctcgggattgcaaaaatgggcgatatgaagaaggttggaaaagtagggggaaaagcgtttatctatttcgaggttgtcaccaccctcgcactcattatcggtttatttgtcgtcaatattatgaagccgggtgcgggtcttgattacagcaagcttgaaaagggtgatgtatcacaatacacgcaaaatggcggtcagggaatcgactggattgaatttgttacacacattgttccatccaacatggttgatgccttcgcaaaaggggacattttgcaggtcttattcttttctattcttttcggagtgggtcttgcggcattaggcgaaaaaggaaaaagcgtcattgatttcttcgacaaggtttctcacgtttttttcaaaattatcggctacattatgcgtgccgcgccaatcggggcattcggggcgatggcgtatacaatcggacacttcgggctcgattccatcaaaccgctggcaagcttaatgatgtctgtttatattacgatgttcctgttcgtatttgttgctttaaatatcatctgcaagctttacggattcagcctgtggaattaccttcgcttcattaaggatgagcttctgatcgtgcttggcacaagctcttccgaatcggtgcttcctcgtatgatggataaaatggagcgctacggctgttccaaatccgttgtcgggctagttattccgacgggctattcgtttaacctcgacggcacatccatctatttatcaatggcgactgtctttttggcacaggtgtttggggtagacctcagcatcggccagcaaattacgattatcctcgttctgatgctgacatcgaagggagcggcaggtgtgacgggaagcggatttatcgtccttgcctcaacgctgtcagcgctgcaggtcatcccgctggagggtcttgcactcctgctaggggttgaccgattcatgagtgaaggaagagccattgtgaacctgatcggaaacggaatcgccacgatcattgttgccaaaagcgaaaatgaatttgatgaagcaaaaagcgtagaggctgtggaaggcatgaaaaaaatgaaaacagcagtctgaaaaaagaacggcccatccatggggccgtttttttaattgtttaagaattattaaggtaaggacagagacctcagcatttttttgttatataatttacaaatggatactatattgaatgaaggacgtttgtcctaacaggagtgtataaatggccgctttagttaaattttttcagcacccgggagtaaggcgtttctccatctttgtcgtgttaactggtgtgttatatctatttaagagcatgatcaacttaatattgcttaccttcattttcacatttctaatggatcgtttggagcttgtcgtgcggcagtttgtaagccagttcttccgcgtgagccagcgggttgtcattacgtttctttacatgttgctggctgtgctgcttacagtcgggggctttgtgttttatccggtcgtcgcggcacagatccagcagctggtaaagcagattaaacatattgcgtatcatcctgacagcatccctttctttgatgagatcaccagtgtcttcggagatattaacatcagttcatatgtcaaagagggcttcaatgtagtgtatacgtatctggccgatatcagcacattcggcttgcaggtcgtgatggcgctcattctcagcatgtttttcttatttgagaaaaaacggctttctgaattcatggcgaaatttaaaacgagcaaactgagggtcttttatgaggagattgcttttttcggaagcaaatttgcaagaacgttcggcaaggtgctcgaggctcaatttatcattgcgctcgtcaactgtattctgacgtttatcgcgctttggattatgcattttccgcagctgtttgggctgtcgattatggtgttcttccttggattgatccctgtagcaggcgtcgtcatttccctgattccgctcagcattatcgcctacagcactggcggtggaatgtatgtgctctacattgttcttgtcatattcgccattcatgcgatcgaaacctatttcttaaatccgaagctgatgtcggcgaaaacagagttgccaatctttttcaccttcacagtactcattttctctgaacacttcttcggcatttggggtttaattatcgggattccgatctttgtgtttctccttgatattctggatgtcaccaacaaggaagataggtctaaaggtccccgagagaatagcgataaaaagtagtttaaaatcgaataatgagtgtgcctcgatctgccggcctgcctgttcagggcatggaattaagactcggaatcggagtttggcattgcttcgcacagtggtgaacacaacaggtgacaatgcctgtcatcattacagaaactgaaaagaacaaacagtcggagcaaacgctcatcatcggtttaaccaaacatttggaagcaacaaatgctataatacaaacagtgcctaatgttgggcactgtttattttttgtcgaaaaaggaggaaggctttatggctgagccgattttacatattgaaggcctcgataaaaagattgggtctaaacagattttaaaacagatcagcatggacgttatggagggcgaaatcatcggcctgctcggtccaaatggttccgggaaaacaacactcatccgtatcatcgtcgggctgctgaaacaaaacagcggaagcgtgacaatcagcggattccagcatgatacagagtttgaaaaagcgatggaagcggttggagcaattgttgagaaccctgagttctatccgtacctgacaggctgggaaaacctcaagcactttgcgaatatgcacaaaaaaatagcggatggacggcttgatgaagtggtagaacgtgtcgggctgacgtcagcgattcatgataaggtgaaaacctattcccttgggatgcgccagcgtctgggaatcgcccaggcaattcttcaccggccgaagcttctcattctagatgaaccgacaaacggactcgatcctgcggggatgaaggattttcgcaatcatgttaaggaactcgcagaaatggaaggaacagctgtcctgttcgccactcatttattgcgcgaggttgaagacttgtgcgaccgtgtcatcatcattcaaaaaggtgagatcaaagcggaagtcagcttacaaggaactgatcaaaccacagaaaaagcaattatagaagtgcagccgcaagaaaaagcgctcaattggcttacaggcaatcaatatcaagctgagagccaagacgggacgattgtagttgaggtggcaaaagaaaacataccggagctgaaccgatcacttgtcggacaagatctgaatgtattttccattacgccttacacgcagtcactggaagacgaatttataaaagcgacaacagctcatcaagaggagggagaagagcttgtctaaattaatttggaatgaacatatgaaactttttaatcggaaggtcactttggtttctcttatcctgatggctgtctttcaattcttcatggcattgatcattaaacggattgtcatcagtgccggaacagatgaaaacttcatcggctatttatcgtatacaccgagcctgaacattttgctgcaggctttaacgatcgtaattgcagcaacaattgtttcgatggaatttgataaaaagacgatcaaatttttgctcattcgtccggttaaacgccaaaaggtcttttggtcaaaattaatcacagtcgtgatggtcagcttctatttgtatctggcatactacattctcgcattattattcggtctcgtgttttttggcacatcggtgactgcggaatcaaagacattgctggtcaacaccttggcgctgatcgggtcaaactggcttgaagctgtaatgatgggattattcgggctgctttgttcttcgctgttccgcaacagcgcggtagcagttgttgtttcttttgtcgttttatacggagcgagtacacttgttcagctcatgaagttgtttgaaaacaagtggggcagctttttgctttttgcgaacactgactttacgcaatacagaagcggagagacagcgttgttttcaggcatgacgccattgttttcaattggaattctcatcatacatgccatattcttcatcgttgttggctggtggtgcttctgtaaacgggatgttcgggtctaaaggcaaggaatgacatttttgtgaaaaagctcacgtaaatcaatatcatttgatattttggtttatactaaaggtactgacggaggtgtctcgattgaggaactttattaccgctttaccgatcatattgctgcttggattctcatttgtgtctttcatgtttcagtttgaacatcttgtttatttcaggctcgcgcttgggttgttttctctcgtgggactgtacatgatatataaaatgaagacgggcatccgctattttatcatctatctgtatgccagctggattgtgttggccgcagtgaccgcttttgaagagccgattttctcaagctttttctttggcggcctggtgatgaccatgggttacctgacatatatgctgatttatctcggcatgaaacaagaccgggatgcaaatcctgtgtaatcgcgctgttcccttggggaacggcgtgtttttctatactgggcaaaaggttaacagttgcggaaaaatggcagggaatctataatacatattaaatttatcggaattaaaactggggggctgccggatgtcattatttatacaaaacgatcaacagcggcaatggatggagaaaatcggacggattgcggatgaatttcagcaaacagctgctgaagatgacgaacagggacgttttcctgcagagaaaatacaaaaactgcgtgatgctgggtatacagcattaacattgccggcatctcatggcggagggggcatttctgtttacgatatgctcctgtttcaagaacggcttgcacggggagatgcttcgacggctcttagcatcggctggcatttgagcgtgatcggggagcttggagaaggcaacagctgggatgaagacgtatttgcatttgttgccaaggaagtccaaaacggagccgtcattaacagggcggcgactgaagcgaaaaccggaagcccgacaagaggagggcgtccgggtacacacgccgtcaaaaaggatggcaaatgggcagtgaacgggagaaaaacctttacgacgatgtcacaagctctggattattttttagtaaccgcatggattgaagacaaacaaacaacaggcgtgtttctcattcataaagatgatcccggcttgtcgattgaagagacgtgggatatgatggcgatgcgggcgactgggagccatgaccttgtactgaacgaagtaatgcttgatgagaataagctggtggaactgcttcaagggcctcgtggagctaagccgaatggctggctgcttcacattcctgcgatttatcttggtgtggctcaagctgctcgtgactatgcagtgcaatttgcatctgagtattctccaaacagcttgaatggaccgatcaagaatgtcccggccgtacagcaaagaacaggcgaaatggagcttgaactgctcaatgccagacactttcttttccatatcgctcaattgtatgacgatccggagcggcgtccacacttgaccagcgagctcggtgcggcgaaacatatcgtcacaaacgctgcgctgtctgttgttgataaagcgatgagaattgtcggggccaaaagcctgggacgaaccaacccgcttcagcgctattaccgtgatgtgcgcgccggtcttcacaacccgccgatggatgacgccgtgatacacaagctggcagctgaagcgtttgagtcataaaaaaaagagccttaccggctctttttatgtattgttttgctcttgcagatttttttgatgcttgcggtcaattctgtcataaataacgttcatcagctttggattgcccataatcgcctctttgttttcctggatcagctgttggtaagttttcactttacgcttcggcatgctccggcgccctcctgacatgtttgtattcactttctaactccgtcagcgacaattcatacagatgacgctttgactttttgtatataccattctgtattaacagatgaatgagctgtttttttctgatttctgcagactgaggtgtcattgtgtcaccaacctccaatcaaacgatattgataatcattatcaattaacttcagtatacaatgtccgcaatagcctgtaaagatgaaaagagtcctattctttctccaatttacaaacattcaacaaatcgacaaaaagtttcccgggcaataatttgctgtcgaaatattccgcttcattgaacgcaccctgctatttttcatgttttgaaccatactatgtaatagaatggaggctggtattcaatggagcggacagaaaatctgaaaaagggagaaaaaggggcgctcctcaatatttttgcatatgtcatccttgctgttgtaaagctagttatcgggattctatatcattctgaagcgctgagagcagacgggttaaataatggaacagatattgttgcgtcagtagcagtgctgataggattgcggatttctcaaagaccggctgacagcgatcatccatacggccattatcgggctgaaacaatttcgtctcttgttgcgtcttttattatgatggcagtcggcattgaagtgttaatcggcggaggaaaagcgattgcgggcggcacaacggaaacgccaaatcttatcgcggcatggacggcgttaggcagtgctgtgtttatgtatggcatctatttatataacaaaaggctggcagcgtccattaaaagctctgccctgatggcagcggcaaaggacagcaggtcagacgcttttgtaagtgccggcgcgtttatcggtgttttttcgtcccagctgaagctgccgtggattgatccggtaacggcttttatcatcggcatcatcatttgcaaaactgcgtgggatatctttaaagacgcttcacattccttaacagacggcttccatttaaaagatcttgagccttacaaacagaccgtcggcaggatcgaaaatgtgcatcgcctaaaggatgtgaaagcgaggtatttaggcagtacagttcatatcgagatggtgattacggttgatccgaagcttacagtagaagaaggccatggagtggcggatgaagtagaagacaaaataaaacatgaacacgatgtcactcatgttcatgttcatgtagagcctgacgacataaaataaggctgtttaacgaattagcttatatgttcagataaaaattcagtcacttcttcaggcgttttggcattggcgctgtgaaggtgagctgttttttcaccgttcttgaaaataagcaggctgggaatgcccattacttggtatttttcagccaggtcaggaagctcgtccttattcagctcataccaatcgttttgattgtattcttccaaaatatcgccgatgaacatattcatgcgtgtgcagtctgggcaccaatcagcataaaactttacaatgatttctttatcggattgaatcagttcattaaattgttcgtttgttgtgatttttttcatatgtcacatctccttttcaatgccattttaatataaaataaaaaggaattacatacaaatgcattcaacatcagcatgcccaaaaataattagatcattttccggtgaaaatgataagatagtaaagatgaattgtagtgggggagtatccattgaaaacaagtctaggattagtgtacggaggaaagtcggcagaacataatgtttccctgcagacggctctggctgtaatcaaagcgctaaatactgagaagtttgatatacatccgatttatataacagaaaaaggcgaatgggtaagaggcgctcgtttaactgagcctgtttcaaatgtgaaaatgcttcaatttgagcaaggaggcagtgctttttctccagctgccctgaaccaggagatgtttccgcaggaagcgtcacagcaaaatgaagccatcgacgtcgtattcccgctcctccacggaccgaacggagaagacggtacgatccagggaatgctcgagctgttgaacattccttatgtcggcaacggagtgcttgcttcctcagccggcatggataaagttgtcatgaaacatttatttgctcaggccggccttgctcaggctaaatacgcagctttccttaagaaagactggactcgttctccgaaagaaagctgtgagcaggttgaacaggaattaggctacccttgcttcgtaaaaccggcgaacctcggctcaagtgtcggaatcagcaaatgccgaaaccgtgaagaactgcaaaaagcgtttgagcttgctttccaatatgaccgcaaagtcgtcgtcgaagaaggcattaacggccgcgagatcgaaatcggcgttcttggaaatgacgatcctaaatgctctgttgtgggggaaatcgcaccgaagacggatttctacgattacaaagcgaaatatgaggatggagatactgatctgatgattccggcgattgtgactgatgaggaatacgcaacaatcagtgatatggcgatcaaagcatttaaagcgatcgacggttcaggactcgtcagagcggactttttcctgacagctgacggcgaagttctgatcaatgaagtcaacacaatgcctggctttacacctttcagcatgttcccgctgctctggaaagaagccggagtggaatatgctgacctgattgaacagcttgtggagcttgcaaaagaacgccacgctgaaaaacaattgattaagcatacattctaatgaagaaggacactgccggtaaaagggcagtgttttttcccgtatatacaaaagaaagagagggaccttacttgattaagcgaacagtaaaaaacattgccgaaatggttaatggcacactaacaaatccgcaatatgaacaaacagtcattcatggagtggcaaccgatacaagaaaactggaacaacatcagctcttcattccgctgaaaggggaacgttttgacggccacacttttgtggagcaggcttttgaagctggtgtagcggctgttctttgggatcggtcagaaccaaatccgcccgagaatcacgccgtcattttagtggacgatacccttactgcacttcagcagcttgcaaaagcctatttgcaggagcttggcacgcgtgtcatcggagtaaccggaagcaatggcaaaacgacaacaaaagatatgattcacgccgtattggggacccagtaccgtgtccacaaaactgggggaaacttcaataatcatatcggtttgccgctgacggttttagcgatgcctgaaaatacggagatcgccgtattggagatgggaatgagcgccaaaggagaaattgacctcttgagccgactggcaaacccggatgcggcagtgattacgaatatcggcgaatcgcatatgcaagaccttggctctagagagggcatcgcggaggcgaagcttgaaatcattaacgggcttaaagaagacggagtgctgatttatatcggggacgaaccgcttcttcaaaatgcatacagctgccagacgaaaacgtacggtacgggagcgcataatgattatcagcttcaggatgtcagccagagtgaggaaggaacccattttacaatcaaagggataaaaaacacgttttttattccaatactcggcaagcacaatgtgatgaacgccatggcagcgattgctgcaggagcttattttggcatcacgcctgagggtgcggcaaaaggactgagcggcctaaaggtaaccgggatgagacttgaactcatcaaaacagacagcggcctttcgataatcaatgacgcttataatgcgagcccgacttccatgaaagctgcaattcaattgacagaaagcctcgaaggctacggcaaaaaaatgctcgtgctcggtgatatgcttgaactcggcgatcttgaagaaacgttccataaagagtgcggcgctgtgatcagccctgataaaattgaccgcgtctttacgtacggaaaactgggagcttttatcgcggaaggcgccctgaaacactttgagaaagaccgcgtcagccattacactgagaaaaaagatctcctccaagctgtgaaggaaaacgcatcaaaaggcgatttgattttattcaaagcgtccagaggtatgaagcttgaagaaatcgttaaagatttaatagagagcccgctttcgtaagaaaatattttgcgaaaaaacgcatattgcatcataaaataacatgatgtgcaaacactaatgtatgccggccgaaaattatgtatatctggccggctgcggctatgatacaatatatataggttatttcgcgatacgaacatattcgtccggacttttcatcgtgacccgaagttctccgctggattcttgggagcggatggagcagcagccggcatattcgagatgccgatctgcttctcatcttattgaaaaacaaatagtgtaatggtaagataaaacttaaagtaattcgggctttgtatacggatggatcctgtccttcttgtctaaagggcagttttataagtggtaaatcacgacattactgaaacagcaattagaaggagtttgaataatttgactataacgtttcaagattttaatttaagttctgatctcatgaaagcaattaatcgtatgggatttgaagaagcaacaccgattcaggcacaaacgataccgctcggactttcaaataaagacgtcattggacaagcgcaaacaggtacaggtaaaacagctgcgtttggtataccccttgttgaaaaaattaaccccgagtctcctaatattcaagcaatcgtaatcgcgccaacccgtgaattagccattcaagtatctgaagaattgtataaaatcggacaagataaacgtgcgaaggttcttcctatttacggcggacaggatattggacggcaaatccgggcgttaaagaagaatccgaatattattgtcggaacacctggacgtcttcttgaccacatcaaccgccgcaccattcgtttaaacaatgtaaatactgttgtaatggatgaagcggatgaaatgttgaacatgggattcattgatgatattgaatctatcctttcaaacgtgccaagcgagcatcagacacttctgttctctgccacaatgcctgcgccgatcaaacgcattgcagagcgctttatgactgagccggaacacgtaaaagtaaaagcgaaagaaatgacggtttctaacattcagcagttctatttggaagtgcaagaacgcaaaaaattcgatacactgactcgccttcttgacattcagtctcctgagcttgcgatcgtattcggacgtacaaaacgccgtgtcgatgagctggctgaagccctgaaccttcgcggatatgcagctgaaggtattcacggtgacttaacgcaggcgaaacgtatggttgcgcttcgtaaatttaaagaaggcgcaatcgaagttctagtcgcaactgatgttgccgctcgcggacttgatatctcaggtgttacacacgtatacaacttcgacgtgcctcaagatcctgaaagctacgttcaccgtatcggaagaacgggccgtgcaggaaaaacaggtatggcgatgacgttcattacaccgcgtgagaaaagcatgcttcgcgcaattgaacaaacaacaaaacgcaaaatggaccgcatgaaggagcctacacttgatgaagcgttagaaggccagcagcaggttactgttgaacgtcttcgcacgacaatcagtgaaaacaacctgaacttctacatgacagcggcagctgagctgcttgaagatcatgatgcagtaacagtggttgcggcggctatcaaaatggctacaaaagagccagacgacacaccggttcgcttaacagacgaagcgccgatggtcagcaaacgctacaagaaccagcgctcttctaaacgcagagacggtcaaggcggcggctaccgcggcggaaaagggaaaagcaacaaccgttcttcctatgacaaaaagcgttcaaacgatcgccgttcttcaggtgacagacgccagaaaaaatcttactaatttgatcgattcagagcccaaaacatgatgttttgggcttttttatgttcgcgatttgttattcagcaaattttcagctgacggaagccatttttctctgtatgcttaagaatgaaacctttctgtaaaagagacgtataaataacgacgaaaaaaagggaggtaggtatttttgagagagcagccaaaaaaccaaatcagtccagacggattaaaggtttggcgacttcaagagatcatcatatccgctgtttgcttacttattgtcattgcagttgcagtgttaagctattattttcattggccgtactggatcagcggcgtgctcggcgcggtttggctgttgggatcgattgtgacggtctttatcattccgaaggtccgtcataaggtgtggcgatatgaagtccatgaacatgaaatagatattcagtcaggtatttttgtggtaacacgtgtgattgttccgatggtcagagttcagcacgtcgatacgtcacaagggccattattaaaaaaatacaacctggcaacggtgaaaatttccacggccgcgaccgttcattcgatccccgctttagagatggaggaagcggatcggctgagagactccatttcccgtctggcgagggtgactgacgatgatgtctgaaccgaaacgcctgcacccggcagcagtcattttgaatttatgccataccattattcaaacgataaaaaatatcattctgccattcttttttgtgtatattgtcaattcaaaccatactgtccgtttttacggagccattgcgctcggtgtgctattcatctggcttgtagcggcaagcattatcaaatggagaaggtttacctatcgaattgaagatgatgaatttagaatcgaagaaggcttatttgttacgaaaaagcgatacatatcgattgatcggattcaaacgatgaatacgagcgcaggccttgtccagcaaatctttaagcttgtgaagctgcaaattgaaacagcaggcggaggcaaggaggcagaagccgttctttctgctatttctgttgaagaagcggaacgcatcaaagaagctgtctttaagaaaaaagcgcaaagacgagaaaatgaacttgatgaagaacggcttgaagctgaagaggagttggttccggccgttgaggtgcaagagcactatcgcatgaacgcgaaagaattgctcatggccgcttctacctccggcggaatcggagtcattatctccgctgtatttgcacttatttcccagcttgatgaagtgctgccaatggattggttattcgataagttttccttccttcagcacgccagcatcggtatttacgcggtactgatttttatcggtttatttatcgcctggattttcagcatcgcgggcatgatgtttagatacgcgaactttcaaatcataaaaaaagagcaggaactggtgatttcaaggggaattattgaaaaacatcaagtcacgattccattgcgaaaaatacaagccattaaaatcaaagaaaatatcattcgccagcttttcggctttgtaacggtgtccatcgtcagcgcaggaggcggcgaccgggaaaaagaagaaggcgctttgaccattctctttccaatgattcataaaaaaaagcttccgcacatgctccgaacatttacgccggaatacacgctggaagaaaactgccgccgcctgccgcggcgcgcgttgaaacgctatttgttccgttctgtcattttttcactatttttgatcatcccgttatgtatcttctttcagccatggggctatctgtcagccatcctgctgccgatagaattgttcttcggctatctcgcgtataaagaggctgcatggacgatcaacggggaccgtcttcagctgacgtctagatttataggcagaacaaccgccattgtactgaaaaaacgaatgcaggtctgcaagttcagccaatcctatttccaaaagaaaggccgcttgtataccatttctacttcggtgaaatcatcgagccatatggaagaattaacggtgagggatgtaggtgaagaggatgcagccttcattttaaactggtactcatatgaaaaagcggacggttaataccgccgctcttttttttgcacgcataaaaacgaaagaagaaacccgccgcatagtccaaacagatgggccatcatgttaatattggagttgataaacgacatgagaacggcaaatgcgagcagtgtgatgatcattttggaatgctcctgccctattagttcattgcgaaaaagaaccataaacaggtacacgccgaatagcccgaaaattgcgcctgaagcaccgacatgcacgtaatcaagcggctctgtaacataagtgccgatattgccgatgatgccggagccggcgtatacaagaagaaaacgcgcttttcccagcatgcgttccaaagccggggcaaataaaaagatggacatggaattaaacagcagatgtgtgaaaccggcgtgcagcaaaatcggtgtgatcagccgccaccattcaccgtttgcgacacctagattatagcctgtgacggtatccctccataacacaactgaatgggcaggaagtgaaaaaaacagccagagaacagcttgcaaagccaatataaaggtgacaacggggtaaagcctgataaatgtttgaaaattttcagtccgtataaacattccgagccccttttcttcattttggtatatctatagtaacacgtttatgagacaaaccatttaaatagtacgtacgcaaaggaggttatcatacatgatttacggcattgggctggacattaccgagcttaaacggatcgcctctatggctggacgccagaaaaggtttgccgagcggattttgacgcgaagcgagcttgaccaatactatgagctttcagagaaaagaaaaatcgaatttctcgcgggcagattcgcggcaaaagaagctttctcgaaagcgtttggcaccggcattgggaggcagctcagctttcaggacattgaaattaggaaagaccaaaatggcaagccctatatcatttgcacgaaactgagccaggccgccgttcacgtatcgatcactcatacaaaagaatacgctgccgcgcaggttgtgattgaaaggttgtcaagctagtctgcatattagggaaaccccactcatatatttgatagtgcattaagggagacaagttgtttgaggcttttatggtacgcatctgttctgcctaaacgtgtaccgagcgtaccgttaaagtcaaacaagcgatttcttccttttacatcaattgagaaaaaggggttgaaaaaggtgagaaaaagctttgttttgcttttaacgggactgcttgctgttcttattctttctgcctgcgggcaaaaaacacagcaagatattgtggccgggttagatgaaaaggcgaaagaatacacctcgtacaaagcaaaagcgaaaatgaccatcgagacagggagtgagcctcaagtatacaatgtggaaatctggcacaaaaagccgtctctgtacagggtttatttagaaaatccgaaaaaggaccaaaatcaagtcattttacgaaatgaaaacggagtattcgttctcacgccgtctttaaataagagcttcagatttcaaagcgattggccgaacaacagcagccaggtttatctgtttgaatcgctcgtaaaggatgttcaaaacgattcggatgcagttttcacagcgaaagaaaagaaatacgtattcgaaacaaaaacaaactatcagcataacaaaatgctgccgacgcaagaaatcacatttaacaaaaaagatatgagcccgtcatctgtcaaagtgatggataccgaccggaaagtgatggtcaaagtagaattcagcagctttgaatttaataaacaatttgataaagaatcatttgatgaaaagaaaaatatgaccctttctcaaatggatgtcgccacaagcgcgaagccttccgatacatttgcggtcaaaacgccgctggaactgccgcttggcgtcaagctgcttgaagaaaaagatatatctactgaagacgggaagcgcatcatcatgacgtacggaggagaaaaatcatttacgttaattcaggaaaaagcccagattgccaaggcttcctcctccgttacgctgaacggcgaaccggtaaatctcggctacaccatcggcgccttgtcggatgcatcattgtcatggacatatgaaggcgtagattaccttctctcttctaaagatctttctaaagaggaaatggtgacagtagcaaaaagcatgcagggacaatcatcgaaataacaacaaaggccaaacatgatttggcctttttttcgttagacatcgtttccctttagcctttaattttagtatgatatgtaaatgatattgaataaaagctaggaagtgtcgtaatgagcacaaaacctttttacagagatacgtgggcggaaattgacttgtccgcgataaaggaaaatgtcagcaatatgaaaaaacatatcggtgaacatgtccacctgatggcagttgtgaaagcaaacgcctacgggcatggtgatgcagaaacagcaaaggctgctcttgacgcaggtgcttcatgcttggccgtggctattttggatgaagcgatttcactgcgcaaaaagggcttgaaggcgcctatattggtgcttggcgcggttcccccagagtatgtggcaatcgctgctgagtatgacgtgaccttaacaggttattctgttgaatggcttcaggaggcagcccgccacacgaaaaaaggttctcttcattttcatctgaaggtcgatacggggatgaacaggcttggtgtaaaaacagaggaagaagttcagaacgtgatggccattcttgaccgtaaccctcgtttaaagtgcaaaggggtatttacccattttgcgacagcggatgaaaaagaaagaggctatttcttaatgcagtttgagcgttttaaagagctgattgctccgctgccgttaaagaatctgatggtccactgcgcgaacagcgccgccggactccggctgaaaaaaggcttttttaatgcagtcagattcggcatcggcatgtatggccttcgcccgtctgctgatatttcggacgagataccgtttcagctgcgtccggcatttaccctgcattcgacgctgtcgcatgtcaaactgatcagaaaaggcgagagcgtcagctacggagccgagtacacagcagaaaaagacacatggatcgggacggtgcctgtaggctatgcggacggctggctccgaaaattgaaagggactgacatccttgtgaagggaaaacgcttgaaaattgccggcagaatttgcatggaccaatttatggtggagctggatcaggaatatccgccgggcacaaaagtcacattaataggccggcagggggatgaatatatttccatggatgagattgcaggaaggctcgaaaccattaactatgaggtggcctgtacaataagttcccgtgttccccgtatgtttttggaaaatgggagtataatggaagtaagaaatcctttattgcaggtaaatacaagcaattaacttacctaaatggagaattcataaaacagctttgcttgaagagtgaataatggtatcattatcactggatggataaaagagtcgtatccgtaagtttggtggaggtgtatgttttttgtctgaatccagcgcaagaaccgaaatgaaaatcagcttgcccgaaaacctagtagctgaattggatggtgtagcgatgcgggagaaacgaagcagaaacgaactgatatcacaagcagtgagagcgtatgtcagcgaacgaacaactcgtcacaaccgtgatttgatgagacgcggctatatggaaatggcgaaaatcaacctgaatatttcttctgaggctcactttgcggagtgcgaggctgaaacgacagttgagcgcttagtcagcggaggataatcatttgattgtgaaacgcggcgatgtttattttgctgatttatctcctgttgttggctcagagcaaggcggggtgcgcccggttttagtgatccaaaatgacatcggaaatcgcttcagcccaactgctattgttgcagccataacagcacaaatacagaaagcgaaattaccaacccacgtcgaaatcgatgcaaaacgctacggttttgaaagagattccgttattttgctggagcaaattcggacgattgacaagcaaaggttaacggataagattactcatctggatgatgaaatgatggataaggttgatgaagccttacaaatcagtttggcactcattgatttttagacatatttgcaggttgctcaaatagagcaactttttttgttttcaaaaaacataaacgatataatagtgaaataacgaaaaaatatgttgttttttattgggaggtaagcgaatttgatgtcgaaccagactgtataccagttcattgccgaaaatcaaaatgaactgctccaactgtggactgacacactaaaagaattaagcgagcaagaatcctatcagctgactgaccaagtgtatgaaaatatatctaaagaatatatcgacattctgttgctgtctgttaaggacgaaaatgctgctgaaagccaaatcagcgaactggcgcttcgagcggtccaaatcggactgtctatgaagtttttggctactgcgtttgctgaattctggaagcgtctctacacgaaaatgaatgataagagattgccagatcaagagagcacggaattaatctggcagattgaccgctttttcagcccgattaacacagaaatttttaatcaatactcaatctcatgggaaaaaacagtatctctgcaaaaaatcgcgctgcaagagctgtctgcgccgcttatcccggtgtttgaaaatatcactgtgatgcctcttgtcggaacaattgataccgaacgcgcgaaacgaattatggaaaaccttcttaatggcgtcgtcaaacaccgttcccaagtcgtgctgattgacattacaggtgtccctgtcgtcgatacgatggttgcccatcatattattcaggcatcagaagctgtaaggcttgtcggagcaaaatgcctgctggccggaatccgcccggaaattgctcaaaccatcgtcaatttggggattgatttatcccaagttataactaagaataccctgcaaaaaggaattcaaacagcattggaaatgacggatcgaaaaatcgtttcattgggggaataacattttgagacatccgaaaatcccgatcttgaaactgtataattgcttattagtgtccattcagtgggaacttgatgaccaaacagcattaacctttcaagaagacttattaaataaaatatacgaaacaggtgctaacggagtcgtcattgacctgacatctgtggatatgattgattcatttatcgcgaaagtgctgggcgacgtcattacaatgtctaagttaatgggggctaaagtcgtcttgaccggcattcagcctgctgtggcagtgacgctgattgaacttggaatcgcacttgaggaaatcgaaactgcgctcgacttagagcaggggcttgagacattgaagcgggaattgggggaatagcgaatgaacgaccaatcctgtgtaagaatcatgacagaatgggatattgtggccgccagacagctgggacgaaacgttgcgaaagaactgggtttcggcacggtagaccaggctagaattacaacggctatttcagaattagccaggaatatttatttatatgccggcaaagggcagattggaattgaacaggtcgcagacagaggaaaaaaaggcctgaaaattatagcggaagaccaagggccgggaattcctgatatccgaaaagtcatggaagacgggttttcaacgtctggaggacttggtgcgggacttcccggggtcaaaaggctgatggatgaattcagcttaaattccgtagcgggggaaggaacagagatacaagccatcaaatggcttcggtaggaggtaagaacgtggattttagggaggttattgagcagcggtatcatcagctgcttagtcgatatatagccgaattaacagaaacatctttatatcaagcccaaaaattcagccgaaaaacaatcgagcaccaaattcctccggaagaaatcatcagcgttcacagaaaagtgctgaaggagctgtatccaagtctcccggaagatgtgtttcattcgctggattttttaatagaagtcatgattggctatggaatggcttatcaggagcatcaaacccttagagggatacagcaggaaatcaaatcagaaattgaaatcgcggcaaatgtccagcagacgcttctcggaactaaagttcctcaggaggaagcgctggatatcggcgccatcagtgttcccgctaaacagatgagcggtgattactaccactttgtcaaagacaaggaatccatcaatatcgcaatcgcggacgtgatcggaaaaggcattccagcggctttatgcatgtccatgattaaatacgcaatggactctttgccggaaacgggcatacacccttctcaagtgctgaaaaatttgaatcgtgttgttgaacaaaacgttgatgccagtatgtttattacgatgttttatgcgaattacaatatggacaagcatcaatttacatatgcttcagcgggacatgaaccgggattctattattctcaaaaagacaacacgttttacgatttagaggccaaaggactcgttctcggcatctcgcaggactatgactacaaacaattcgatcagcatctggaaaagggcgatatgattgttttattttctgacggcgtcacagaatgcagaacggaaaacggtttcttggagcgtcctgatctgcagaagctcattgaggaacatatgtgttcctccgcgcaggaaatggtcaaaaacatttatgacagcctcctcaaattgcaggattttcagcttcacgatgattttacgttaattgttttgcggagaaaggtttaacgtctgtcagacgagggtataaagcaactagtgatttgaaggaaaatttgaggtgatacgaatgaatataaatgttgatgtgaagcaaaacgagaatgatatacaagtaaacattgcaggagaaattgatgtatactcagccccggtgcttagagagaagctcgttcctctggcagaacaaggagctgacttaagaatttgcctgaaagatgtcagctacatggacagtaccggattgggcgtttttgtagggacctttaaaatggtgaaaaaacaaggcggttcgctgaaacttgaaaatctttctgaacggctgatccgactgtttgacattacaggcttgaaggacatcattgatatttctgcaaagtcagaaggtggagtgcaatgaagaataatgctgattacatcgaaatgaaagtgccggcccaacctgaatatgtgggaattataagactgacgctgtcaggggtcgcaagcagaatgggctatacgtacgatgaaattgaagacttgaaaatcgcagtcagtgaggcgtgcacaaatgcggttcagcacgcttacaaagaagataaaaatggggaagtgtcaatacgattcggtgtgtttgaagaccgtttagaggttattgtggcggatgaaggagacagctttgactttgatcaaaagcagcaggatctagggccgtacacaccttcgcacacagttgatcaattatcagaaggagggctcggtctatatttaatggaaacgctcatggatgaagtcagagtgcaaaaccactccggcgtcaccgtagcgatgacaaagtatttaaatggggagcgagttgatcatgacacaaccatcaaaaactacgaaactaactaaagatgaagtcgatcggctcataagcgattaccaaacaaagcaagatgaacaagcgcaggaaacgcttgtgcgggtgtatacaaatctggttgacatgcttgcgaaaaaatactcaaaaggcaaaagcttccacgaggatctccgccaggtcggcatgatcgggctgctaggcgcgattaagcgatacgatcctgttgtcggcaaatcgtttgaagcttttgcaatcccgacaatcatcggtgaaattaaacgtttcctcagagataaaacatggagcgttcatgtgccgagacgaattaaagaactcggtccaagaatcaaaatggcggttgatcagctgaccactgaaacacaaagatcgccgaaagtcgaagagattgccgaattcctcgatgtttctgaagaagaggttcttgaaacgatggaaatgggcaaaagctatcaagccttatccgttgaccacagcattgaagcggattcggacggaagcactgtcacgattcttgatatcgtcggatcacaggaggacggatatgagcgggtcaaccagcaattgatgctgcaaagcgtgcttcatgtcctttcagaccgtgagaaacaaatcatagaccttacgtatattcaaaacaaaagccaaaaagaaactggggacattctcggtatatctcaaatgcacgtctcgcgcttgcaacgcaaagctgtgaagaagctcagagaggccttgattgaagatccctcgatggagttaatgtaatgatccaggttgaagaaaacgagcatattcaaactctagtatatcaactgaataaagaagggaaatcgatttgcggtgacagtttttttatgaaagctgatgataaggagttaatttgcgcggttgctgacggactgggaagtggatcacttgctaacgaatcctctgcagccatcaaagacttagtggaaaactatgcgagtgaagacgtagaaagcattatcgaacgctgtaatcaggcgatgaaaaacaaaagaggcgctacagcatctatcctgaaaatcaattttgagcaaaggcagtttacgtactgctctgtcggaaatgtacggtttattctgcattccccgtctggtgaaagcttttatcctctgccgatttcgggctatttatcaggcaagccgcaaaaatacaaaacgcacaccgccacctatgaaaagggttcaaagttcattatacatacagatggactcaacgtacctgatatccgctcccatttaaaaaaaggccaatcggtagaagaaatatcgaattcgctgaaaatgtatacgacatcgagaaaagatgacctgacctatattctcggacagctgtcctagagaataagaacaagaagaagccggaatgccggcttctttttttatgtgtttttttcggtttttgatacactagagacagaacgacaaaattggaggctttggttacatggaaacgtcagcccttttaaaacagcaaattgcgaaagaaataggtttatcacaaaaacacgttgaaagtgtcatccgcctgcttgaggacggcaatacagtcccgtttattgcccggtatcgaaaagagcagacgggttcaatggatgaggttcagattcagacgatttctgaacgctggcaatacatacaaaacctgaatcagcgaaaagaagaagtcatcaggctgatcgcagagcaggataaactgacagatgatctaaaacgtaaaatcgagcaatcggtgaagcttcaggaagtggaagacctttaccgcccttataaacaaaaacgtaaaacaaaggcgacagtcgccaaaagcaaaggccttgagccgcttgccgactatatcctgacacttccccaagatgatcgtctggcagcaactgcagaccaatacatcagcgaagaaaaagaagtgtttacgcgagaagaagcgattgaaggcgccaagcacattattgcggaacaaatttcagacgagccgaccttcagaaagtggattcgccaggaaaccttcaaaagaggaaccattaagtctgcagcaggaaagtcggcagacaccgatgagaaaaatgtgtatgaaatgtattacgagtatgaagagccaattgcaaaagtcgttccgcatagggtgctggcaatgaaccgcggcgaaaaagaagacattttaaaggtagcgattgaaccgcctgcggatcacattaaggcgtatttagaaaaacaagtcatcaaaaatcgctcaacatccgtaagagagattttgcaggagacaattgatgacagctataaaaggctgatccagccggcaatcgagcgtgaaatcaggaaagagctctcagaaaaagctgatgaacaggcgattcatattttctcagagaacttgagaaaacttcttttgcagccgccgatgaaaggcaaaaccgttctcggtgttgacccagcctttcgaaccggctgtaagctcgctgtgtcagatgagactggaaaagtcttgaaaattgatgtgatctatccgcatgcgccagtcaacaaaacaaaagaagcccatgaaaaagtgaaaaagattcttgagcagtatcaagtcgagatggtggcgatcggaaacggcacagcatccagagaaacagaacaattcatcgtcaatgtactgaaagacatgccgcgcaaaatttattatgtgatcgtcaatgaagcgggtgcaagcgtctattcggcttcagagctggcccgagaagaattccctgaccttaaggttgaagagcgcagtgccgtgtctattgcgcgaagacttcaagacccgctcgcggagctcgttaaaatcgatccgaagtctgttggtgtcggacagtatcagcatgacgtcagccaaaaacgcttaaatgaatctctgcggtttgtcgtcgaaacggtcgtaaaccaggtgggagtaaacgtcaacacagcctccgtcgcgctgcttcagtatgtagcgggattatcgaagtctgtagcaggcaacgttgtcaaaaaacgtgaggaaatcggaaagttttcaaatcgaaaagaactgaaggacatcccaaggttaggtgcgaaaacctacgagcaatgtatcggtttcttaagagtgcaggaagggacagagcctttggatagaacaggcatccacccggaaagctataaagaaacaaaagcacttttgaaaaaactcggactttcaacagaacatatcggcacggcggaattgaaggacaaaatcaatcagctggcgctctctgaaacggcaaaagagctgggaatcggcgaaatcactctgaaagacatttgtgaacagctgacaaggccggaacgcgatccgcgcgatgaggtgcctaagcctttgctgaaaacagacgtccttcagctggaagatttgaaagagggaatggaactgcagggcaccgtgcgcaatgtagtggacttcggagcgtttgttgatatcggagtcaaacaagacgggcttgtgcatatctcaaaattgagcaatcaattcgtcaagcatcctcttgatgtcgtatctgtcggcgatattgtgacagtttgggttgacggcgtagatgtacaaaaaggcagagtatcgctgtctatggtaaaataaaagcactgcttacgagcagtgttttttcctatagaaataccagcattgattcagcagtttaatttggtaattatctttttcaaggaacgctttttgcatctgctttttaagccaatttggcataggctcattcctcctcagcttttatcataagagggacggtgattaccatattgtatgcgaacggtgaattgtcccgttcaatgttttttaagtgaggtgcgctatggataatatagagcttcaaaagctgacagaggatatttctaaaacatattttaaaaagccgttccgccatcaggcgctttttaatgacaggcttaaaaccacgggcggaaggtacctgttaacctctcataacattgaattgaacagaaaatatctgattgaacacggcagggaggagctgatcggcatcatcaagcacgagctctgccattatcatctccaccttgaaggaaaagggtacaagcacagagacagagattttagaatgctattgcagcaggtcaacgcgccgaggttctgtacaccccttaagaaaaaagcggaaaacaaaaaaacttatatgtatatctgtacggcctgcggccaacagtatataaagaagcgcgccatgaaccctgacagatacagatgcggaaaatgccgcggaaaaataaaaagaattttttcgtgaaaaaggttgacgaatatggcaagcctatgttacattataaaagtcgtcacgagagataaataaaaacatttacctcttgacactgcaaatcaaggctgatataataagtcttgtctcattattccacagtagctcagtggtagagctatcggctgttaaccgatcggtcgcaggttcgaatcctgcctgtggagccatattggagaagtactcaagtggctgaagaggcgcccctgctaagggtgtaggtcgcgtaagcggcgcgagggttcaaatccctccttctccgccataagatttcgatataagttctcaaccatcggcccgttggtcaagcggttaagacaccgccctttcacggcggtaacacgggttcgaatcccgtacgggtcattccatttcgttgggctatagccaagcggtaaggcaacggactttgactccgtcatgcgttggttcgaatccagctagcccagccattttttattttttgaaatctaatagtaagagccattagctcagttggtagagcatctgacttttaatcagagggtcgaaggttcgagtccttcatggctcaccatttgtatttttgcgggtgtggcggaattggcagacgcgctagacttaggatctagtgtcttacgacgtgggggttcgagtcccttcacccgcactttatttacaaagtgcacgcaaatcggttttactaggttaagagcctactaaaccagcacaaacacaatttaatgatcacgcggtcgtggcggaatggcagacgcgctaggttgagggcctagtgggtgaataacccgtggaggttcaagtcctctcggccgcatcaatgataccaagggtttagagtaccttggtattttttgtatcttttgaacagaaggtattttgtgattaaaactgaccacttacctaaagtaagtggtttgatttgtccgcaaaagtatatagttaaataagataaaaaggacatagtatatcagcatacaaaatatgttatgcctttttttgttttaataacgcatccgttattttcagcgtacaatgttactttattatggaataaaaacaagtgtctgtaagcttgcttccatctgcggataaatcatcatttcttaaagtgccttcgaatacaaacccaagtttttctggaatagcacgacttttaaggtttgttgattcacatcttatttcaattcttctaaatttaatattgtttaacccaaaatcagctaatttttttactgcttctgtcatatatccattcccgccaaatttagtatttacccagtacccaatttcacatttaggaatggtccagtcaatcctctgaaggctagttattccaataaagttattgctagctttatcaaaaataagaaaacgaaaactttccctctttaaaaaatttatatgagcatttcttaaatttatctctgtttcttcaacagtaggaagttcttgagcaaatggcaaccaggcttttaattcattaaaggaacccctaattgcttggtttacaattttcccgtctcctgtttggtgtggtgctcgaaggattagtctttctgtttccaattgtaaaggcacatctaacaataaaggattcatttgatttctcctctcggaattttatattaaagaagcaaagtaatacaaaataaagctttatgacgtgcgcaaatttagttcaatttgcgtttaatcttctaaaagatattttcgtaactgacatcatatacctattgtgagaaagtcgatgataagtatcatgagatggaaggtatgccaataaacggtgaaaatgatcgtcttggcttatcaaagaaaacaccagactatgaagaagcaaaagatgaagagacaaagttaggagtaaaacgtgtgtttactcctcttttttaattcttgggttcattttcctcattctgggtgttcgattgggtgctcttttttcggtgaatttttttcctgtcaacatctccatttgacgtctagctctggccatttcagtaggaagaatgtaaatatattcaagtatcttatttgtaaatttaaataaaggctcaaccatagtactgttaaattctatatcatcaccatgagcagctgcattccctgcctctttaatcatcttagaaagaccgcccattaaaggtggtaaaattttcttttcctctaagtcgttaagttttgcatgaagcgttcttccaatagcccctttatttttacataccatttccaaagttcttctaagagccattaggcacaccatagcatcaattttccttacatttaaagctgactcataagcagatttaatgtttttaggtaagaggtttaaattcacctgttcactatatgggaacaaaacttgaccatctttataaatatcatcaccctcgttgtatacttcttcagtattccaatgagtatgatacagttgaaattcaaaacaaacaggacactcgaacacttcaaatatgtcattaaattgggcttcataagaggttaatggtacaaatgtttttttttcatatctgtttaacaaattcataggtgccttagttccacaatgtgggcaagtgagaattgtattttctgtcattttatctccctcaatagatttttcctcgtattataacactcttgtttaaattgttaaaatttatcactaatgatttaatagttagcaaatttatatgaaatctaaggaaatagaagatctcaataatgcttatgagactataaaagaaattgagaagcaagggcaattaactggcatgttggaatactatttttacttttttaagggtatgtacgagtttaggcgtaaagaattaatttcgtgataagtgcttattgaatagctgaatcaaagttgtcagaagttgaggatgaaatagagaaagcagagttttttttcaaagtgtcctatgtatattattatatgaaacaaacatacttctccatgaattatgcaaatcgtgcactcaaaatatttagagagtatgaagagtatgctgtccagactgtacgttgtcaatttattgtagcaggaaacctaatcgattctttggaatatgaaagagccttggaacaatttttaaactctttggaaattttcaaggaaagtaacattgagcatttaattgcaatgtcacacatgaatattgggatttgttatgatgaattgaaagaatataaaaaggcttcacaacatttaaacttggctttgcaaatttttgaaaaatcaaaacatagttttctaacaaagactttattcactttaacctatgtggaagcaaaacaacaaaattatgacgttgctttgacatactttaggaaaggacgatttattgtcgataaaagtgatgacaaagaatactcagcgaaattcaaaatattagaggggttatttttttcagatggcgagactcaattaataaagaatgcattttcatatctggcttcgagaaaaatgtttgctgatgttgaaaatttttcgattgaagtcgctgattattttcatgaacaaggaaatttaatgctctctaatgaatattatcgtataagtattgaagcaagacgaaaaattaaaaaaggggagatcattaatgaaaatcaaccggattctattggcagcagtgatattaggtagtgttttatcatttggacattttattgatcaggatgttaaggcatcaatacaagtagcttctgatagagttggggcataattagataagaaagagtgaggttgaataatatactcactcttttattgattaaagtaatactcctaataatattatttcccttgatgtgctaaaattaagttatattggtacttttcatcatcattataagcttaaaaaatatggtattaatctaacagtgaaagaggaatgtaaaaatgaaagaggctaatgatcattatcctagttacggggcaaataaatttgtgtgtccaacatgtatggtgtattcacaacaaaagtggtatgagattcaaaaaaatgatatggataacgaattaattctcacagagcatttaagaacaagagggcgtgtgcctgcttatgcaagtccaaataaagaagctagtgttatacatgctatacctcaatttcacaccgataacataactgctctaagtgtgtgtatcagttgtgatcaaccggcttactggattgatggagaattagtttaccctaaaaatccaactgtgaaacctccaaattccgacatgccggaagaagtgaaaaaactttataatgaagcgagagaaataagtgtactatcacctagagcttcggcagcattacttagattagcattagaaaaattattacctttattaggtgcacaagggaagagaataaacgatatgataggtgacctagtacagaagggactttcgccgaaaatacaacaggctttagatagcttacgtgtaattggaaatgaagccgttcacccaggttcaattgatttagatgaagaaaaagaggttgcattagcgctatttaagttaataaatttagttgtagaacaaatgataaccgaaagcgatgaaatagatgagatttatagtctaattcctaaggataaacgagatgggatacaaaatagggatcaaatgaaaacaacaaaataagctaaaaaaatgaacataccacaacgatgttggtatgtttgtttattgaaagaacattcatgaataagttgaggtcataggaaaagtgtttttcttcttaaagaagtgcccattttctgcccagaattaataataaattatcaaaatcagtgtaaataatataactcgatgctatgaataatggcttttgtaaatgaagatatgattttgctaggttgagggactcgaattaaaaaagaagataccaaactatattggtatcttctttttttttgcatcagagttattaaatctttttatattgctgatgttaaattaatgtcccatttttacactaacgatgtgacttatatgataattatatacaaaaatcacttatatctagaaaattaaacaaatttacacaaaaaaggacaaaataatctttacaaattacgacaaatacttgatgttttttgtaatcaacccttattttgtgacaaatatatgaatattttgtcaccctgtaaaatatttatttattatatatatttaattcgagaggaggtcatataaagaacgaatattcgaattagtatgaatttaccgggagatagattcataaaacaattaaataatgggagtgggagtctatgagaaagggctttgtgcctaaagcttacatactgaatcttaggaaaaccctaatgatttttgcagtcttgttattgattgctggcaatgtgttgacagttttgccgaatcatattcatgctgaagataatacagaggtaactcaaagtgcagatactacttgcccagctcctgttgcgttgattaacggaagctttgaacaaggtgctgcaagaggatctgcatatgataaatccggactctattatctcgaatccgaggtacctggctggaaaacgactgatgattcctctggtcagaaggcaattgaaatatggaactatgcacagaatattccggctgttgtgaaaaattggccagcacctccggatggcaatcgctgggctgaattaaacgcttttgaaaatggcatgttgtatcaagacgtgaaaacaacgcctggacaaacgatttattggcgcttatctcatatgggacggcaaggtgttgacaccatgcaggttcgtattggggcagctactagcaatccatacagtacggtggttcaaaaacaattctctgatggaagaactgcatggggaactcatacaggttcttatactgttcaagcaggccaaacgacaacgcgattcggttttgaagctgtaagtacagcgtctggaaatataggagccggcaactttttggatgatattttccttggaacagaaccatgtgtgacggcaaataagtcagtttcaccacagggagaggtacaacccggggatgagcttacatacgcggttcaaatcaaaaatgaaggcggagacgttgctgctgatgcaagcttttcagatgcaattccagagggaactgaatatgttcctggatcattaaaattaattaacggttcgacaacaaagaatttaactgatgcagcagatggtgatgaaggcaattttgatggtaataaagtaaatgttgcattaggagatctacctaacacgaccaacttgcctaatggaatgactgtacagtttaaagtgaaagctaagacaggttatgtcggcaaagaaatttctaacaaagcgcaaataaactatgacagtctattaacgaatgcaagtaaaaaaactgaatcaaacgaagtaacgactccggttgtttttaaagatcctgtacttgaatcaaagaaaacatctgctattaaggcaaaagcggatggaaaccaagacgtggatcacccagaagttggagatacgctttcttacacgattcaaacacgaaatacaattgaagacagtcaggtgaaaaacgttaccatttcagatgcggtgccagaaggcttagaatatgttccgggctctttacaagtagatggcacatcagtcagtgatgctcatgatgatgataaggggcagtatgctgatgggaaagtatcaggacaggttggtaatataagcgataccaaatggcataatgtgacttttgaagcgaaagtgaagtccggtcaagcaggaaaggatattatcaataaggcaagcatttcaggagataatattgaaactccggatacaccgagtaatgaagtcaaagtttatccgaggaatcctgccttagagtctaagaaaacatcagcaattaaggaaaaagtggcaggaaacaagtatccggatcacccggaagtaggagacacgcttctttacacaatccaaacacgaaatactgaagaagacagtgaggctaaaaatcttacgatctcagatgctctaccaaaaggactggaatatgttccaggcactctgaaagtagacggtacagcagtcagtgacgccaaagacgatgacaaaggtgatgtgacagacggtaaagtgtcaggccaaattggtgatgtgactgatactgaatggcataatgtgacctttgaagcgaaagtaaaggccggacaagctggtgaaacaattcaaaatacggctagcgttactggaagcaacgtcgacacaccagataagccgagcaatgataccgagatttatccaagaaagccaaatgtagaatcgaagaaaactgcaagcctacaggaaaaagcagagggcaataaagatgagaaacatccagaagtaggagatacacttctttatacaatcgaaacgagaaacacaattgaagacagtctgctgaaagatctcgtcatttcagatgaacttccggacggattagaatacgtttcgggctcactcaaagtagacaataaaggagtcagtgacgccaaagacgacgataaaggtgatgtgacagatggcaaagtgtcaggtcaaattggtgatgtgactgacacagaatggcatactgttacctttgaagcgaaagtgaaagctggccaagctggtgaaacaattcaaaatacggctagcgttactggaagcaacgtcgacaccccggatactccaaaaaatgaagttgaagtttatccgaggaatcctgccttagagtcaaagaaaactgcaagtattcaagcaaaagcagagggcaataaagaagagaatcagacacaagtgggagatacacttctttatacgatccagacaagaaacacaattgaggatagtctggtgaaaaatcttgtcatctcagatgaacttccagaaggcctagagtatgtttctggaacgctaaaagtagacaataaagccgtcagcgacgcccaagatgatgataaaggcgctatgacagacggcaaagtatcgggtcaaattggtgatgtgactgatacagaatggcatactgtaacctttgaagtgaaagtgaaagctggccaaagagatcagaaaattgtgaataccgccagcgtcacaggtgacaatgttgataaaccagatacaccaagccatgaggtcaaagtttacccgaaaaatccagtcttagagtcagagaagacagcaaagaatctggattccgataaagagaagtatgaagcaggagatacgattgtttacacgatcaaaacaagaaatacagtagcagacagtaaagtaactgatctcgtcatctcagataaactgccggaaggcttagaatatgttccaggcacactcaaagtagacaataaagaagtcagtgatgcccgagatgatgataaaggcgatgtgacagacggcaaagtatcaggccagtttggcgatgtgactgatacagaatggcatactgttacatttgaagcgaaagtaaaagctggtcaagcagacaaaaaaattgtcaatacggcgagcattagcggtgataatactgataaaccggatacaccaagccaagaggtcaaggtttctccgaaagatccagttctgaagtcggaaaagtcagtaaaaaatctcgattcagataaagggaaatatgaagcgggagatacagttgtttacacgattaaaacaagaaatacagtagctgatagtaaagtaactgatcttgtcatctcagataaacttccagccggattgaagtatgtcgaaggcagcttgaaagcgagcaacggtggagaagcaaccatcaaggacggcaaaatcacagctaactttggtgacgtgactgataccgagtggcgtagtgtgacattccaagcgaaaattgagtccggatatgcggaaaaaacaattaaaaacgtggcaaccgttgacggcggcaatatcgacacaccagatacaccgggaacagacatgaaagttgatcctaaggaaccaaaactagaatcaaagaaaacagcctccattaaggaaaaagctgatggaaataaagatgaggaccatccggaatctggcgacacgcttctttacacaatccaaacccggaacacggttgatgacagccttgtcaaagatcttgtcatctcggattctcttccggaaggattagaatatgttacaggaacattgaaagtggatggtacagcagtaagtgatgatcaagacgatgatcatggatattatgccgatggtaagacgtcaggagagtttggcaatgtgaccgatacgaaatggcactctgtaacatttgaagcaaaactgaagtctggtcaagcaggtaaagatatcgtcaacactgcaaacatcagcagtgacaatatcaagacccctgacaaaccgagccatgaagtgaaggtatatccgcgaaatcctgttttagaatctgaaaaaacagtgaagaacttggattcagataaggaaaagtatgaagcaggggatacggtagtctacaccattaaaacccgaaatacagtatccgacggtaaagtagaaaacctggtgatttcagatgatcttccagccggattgaagtatgtcgaaggcagcttgaaagcgagcaacggcggagaagcaacaatcaaggatggcaagattactgctaactttggtgatgtcactgatactgagtggcatactgtgacattccaagcgaaaattgagtctggatatgaaggcaaaaccattacaaacgtggcaactgtaaatggcagcagtattgataagcctgataaaccgaaagcagagatgaatgttgtatcgaaaggttccgagaaaccaaatgaacctgctaagccaagcaaaccaacgtcagagccaagcaaaccaacacccgaaaaaacagatggaaagacaaatacaggaaaagaacttccaaatacagcaacaaatacgtataatctgatccttgttggtttggtattgttagtagcaggaactgcactttggtactttagaagaaaaagaaatgcctgatgttgcatgaagaaatatcttcctatattcatcattattgccggactcgtttttacaggttacggagtctggaaagtgatggacatcagtcataaaacagaacaaactttagatgaggcaaaacttgcattaaagagtccttctggaaaaaatgaaggctcagataaagaaggatttaagcctaagttcggagaggcagttggcattctggagattcctaaaattaacgcagagcttccgatagtagagggaaccgatgcggatgatctggaaaaaggagtcggccattacaaaggaagctattatccagatgaaaacggacaaattgttctatcaggccatcgggataccgtcttccgccgaacaggagaactaaaaaaaggtgatcaattaaaggtgaagctgccatatggaagtttttcatatgagatagacaaaacaaagattgtagaccaaaaagatacgtctattattacgctgcagcataacaaagaggagctaattctaacaacttgttacccattttcatatatcggtaatgcaccaaagcggtatattatttatggaaaacggatttgagaaatccagaatatcaaagattaggctgacgaattttcgtcagcttttttaatcatgttctttctgcattctggttcatgttaaatcatagtaatctaggttaatataaaagtattttgtatatttttataagtttactttacttttttataaggtgagtttataatttggttcaagaggtgatggtcatgaagaaagattttggtgattcgatctcaaataaggtttatgaatatcgtgtacttgccagattgtctcagcaagaattagcaaagaaagtcggggtttccaaacaaaccatctttgtaatggagaaaggaaattatgttccgactctgctgttagcttttcgaattgccgaattttttaatgtggatgtaaacgagatttttacttatgagaaaggaaatgatcaaaaatgaaaatgaattcgatcacagatacgatcaccaacgcaattttttcccctttaaagtcctgggctgaacattctccgggaaattggaatattcttattggcagtgggtttgtattgcttgtagtcggattgattctgacattcgtatttactaaaaaaatgggtaagactgacgaaagaacaaaccaaatcgctttaaatggtagcctctgtacgttatgtgcactaattttttgcgacttgcttttcccaaaagaatatatgtggcaagttttcttcttatttaagtattctattgcattcttcgcttcagcaatctatctagccgttcgatataaaaaagattttttgtaaattcaattaccgagaaagatagtgtctctgtagttgtaattgttttaggagagggaacgaatatgaaatcatttaataatgaaatttggagatgtgggaaagtatgggggttttttgctcgccaattattaaccacaattcatacaaaccgttagagatgatgtaaaatgtaatgaaaataagctttcataaccagtgctatggattgactatgttgagggcctagtggggtgaataacccgtaaaggttcaagttctctcggccgcacccccaataataccaagggtttaaccatctttggcgttattcttttgcggaaaatacggcaacaaatgtaccgcattgtggagtccactaaaaaagtgctgacctctgcacaacatcgttgcgcgagtctgcacttttattctgcgattatggggagtttattttaatccgttgttagccgcgccgatacttggcttttagaagctttttttaagtggctaaaaccaacaaattttttgccttcttcatcccataggcggaactttaacgatttaaggcttgttgccagtgtaatggtcggaacgttttgcaatggtttagtgttgttatgcactttttcaagcttatagtttgggactctcgggcttaaatgatgaacatgatgaaaaccgatattgcctgttagccactgcatgacttttggaagcttataaaaagagcttccttcaactgctgcttttacatattcccaatgctcatcttcttcaaaataagaatcctcaaacgtatgctgaatataaaacatccaaattccgagagagcctgatatcataaaaatcggcacctgaaccagcaggaagttttgccagccaatagcccaacataaaagtgctgccaaagcgacgatccccaggttcgttacatacgtattcatccgttctttgcgttttgccccttttcgattaaaacgattggcaatcccgaaaacgtaaatcggcccaataataaacataacaaacggatttctgtacaatcggtacattatttttgtcttagttgaggctttcttatattcctcaaccgtcagtacccaaatatcgcctgtaccgcgtttgtccagattgctgcttgtcgcatgatggacagaatggtcgtgtgcccaatgatcaaaaggatgcagagtcagaattcctgttaatgttccaaggattcgattcgcctttctgttcttaaaaaaggaatagtggcagcaatcatgaaagatgatgaaggttctcactaaaaaacctgccgcaacaacagaaatcgctaatgtaaggaaataagaaatcgacaagctcttatatgccaaacaccataataggaaaaatggtaccaatgtgttaatgatttgacaaatgcttttgtgtaaatcggacttttcataaggtgtaaccagttttctcaaagtccttaggttttgttctttcatattaaaaagtttccccttccctggtgatcttctaagtgtagaaaacgttttatagccttagaaggcccaacgtgatacaccccatatatgataagtatccttcccgattcatctgtgaaattattggaaatgataaactgatttccagtttattattagcagagtcagccgggatacaaaaggcgtatgaagattatacccagcactttattgggtcaaactctctcaatgctcccccatggggatcgatttatttgaccgtgaacattgattgtttgaggaaaaaaggaatgaagtaatgggtatatccatgagtgactgtttggaaacatctgcagaaacaaagttttacaagtgaacagccttgtttttaaaagattatcttgctctttaacaagaaacagctgagctaagtactattaagcaaagaaaaaggtttgaagacactcgtgattcatttttcatggtgttttcaaaccaaagtttttaataggcctcttattctgcactggtatacacatgtttaacaaataatgccatgaataaatcggaaatataatttgcagttatttccgattcctgatataataaagaagaattatttttgttcggtgtaaaggatagtatgaagattgacttttcgtcttgatgatactttgggcaaggatagtatatactgtgtggttacacactaggaggcaacaaaaatggaacaaggtacagttaaatggtttaatgcagaaaaaggttttggttttatcgaacgcgaaaatggagacgatgtattcgtacacttttctgcaatccaaagtgacggattcaaatctttagacgaaggtcaaaaagtatcgttcgacgttgagcaaggtgctcgtggagctcaagctgctaacgttcaaaaagcttaatcttcaatcgtttatacaaacaggctctttatatagggcctgtttttttatgtctatatcatactcaataaaaaaccctactcaacgttcgagtagggagatgctacaaggtatagaaaaagatttaaaacttcaaaggtttgtttacagtataacatactggattgacaatatgcggaatgtatataaattatttaatgttttgttcaaatataactctttcttttttcacgttcgttactttaagtaagattagatgaattataaaaatggtttcatctaaatgttatcaactcgcatatctcttttatgagaagaagataaacaattattattcaatgtggcagtggatataagaaattcttaaaaataatgaggagatcgattgtttttttctcctggaaataatcacttagagatacctaaaacaatgaaagccctacctctcttccatccttacggctccttgtccgtgccagtgtgaatcaggatactaaaaaaagtgactattttattgagttttttggtaaaacttcaatcttcgcagaagaaatgtaaataataaaaatggattagaatgtaggaataacaaaagaggtcgttaatgttctaaacataagttggagaagatttgcttttcatcataatattccgaaatatcttttgggatgtatctaaccaaaactttttatttgtttttcagtgattcctttaattacttccagttcactaatcaaaaattcatatgcattatccagcatttttttttcgcttgcattaagtgctttttctttcttcatacgcattaaatcacgtacaacttcagcaccttcttgtatttcacctgtttttattttgtccgtgtttattttgtacctttgcttccatggcagtaacctatcggattctccatgctgaaaaatgtgcataatgtgttttaatgcaagtatatcggtaactggtcgtatattcgaactcaatattttactcgttggaatcataactgtcatattactgattgacattcttatgacataatactgttgtttttcctctaagaattctttttcttctatggcttcaattatacctgctccgtgcattggataaacaatgttatcgccaatttgaaacatatcatccacctccatatatggtatccttcttaagattaccatatatggaggtgtaatatcaaaattttaataataacatgatcgaatttttgatgtcaataacttttttgaaaaaacagatcaagcaaaaacaatagggaacgtgtcggatttccaatcaggaaaaggtcaattgatccgtgtgagcagtttttcattggctcaatgacatcacagaaatgatttgagtagaaataagaaggaacgatatttgtgaaatgtcagctaaaaatattaaaagtacatgattaagttctaatttctttaccgatttgatatggataacggcccacttacttaatgatgcattttcacttatcttgcgaacagaaaaaggtttgtggatattgaacattttgccaccgagattggcattattatcatggaaattgacaaccttcaaatgggtattgaggtgaaaagaaaaataaagaaaggagagattataaatgaagaccagaacataaagaagtgaaggggaaagaacaaggttaattgaaaagcaaactatataaaatagtttgcttttctttttgttatgaattcacttctttttctttctctttaatgactaataaaacaccgctcagaattaaaaacgaacctatccaaaatgtcccgcctatttgttctccaagcagaatccatccgagtaaggttccaaccagaggctgaaaaaagaaaaagaggcctccacttgaggcatttaataattgtaagcctcggttccacaataaaaaagcacaagcggttgaaacaattcccaaatacaaaagaccacctagaattttagggtcaagcagttgtgatgtaaaaatggtgctaggttttacaaaaggagttagcgccacaatggcaacaaaagttgaatatgttgtaacaagtattggtgaataactgcttggaacgcgtttgatcagcactgacataagtgcccatgtaagggctgcaacaagcagagaaataccgccaagctgatgagatgtatcaatatgtccgtttcccacaataaagaatacacctatggtcgctaaaataattgaggttccttttttgatagtcaatggttctttaagtaatagacgagcaaaaataaccatgaacgctggtgtggaggacgtaataattgctcccatttgtgctgaagacaacatcgttccatattcttgtgtaacaattgaaatggtgttgccaacaattccaatggccacaattaataaaagatcgcgcttatgaattttccaagattgtttccttattaaaccaacaataagaagcgcaaggatggcgatgacatacctggtccaaaccaattcaaaaggcggaatcactgcgacaacaaccttaaccacaacatacatgccaccccagatactagcggctaaagctaaatatatagaacctaacagggtatttttcatttttttgttccctccgtatttaaaattaggtcaataaatgccctaacggagagaagtagtcactttactccattaagggcggagaagtgctactggaacatcattttcaaatagtggagctaaaaacatgttatgatcacctcgatttttaagaatgactatcattatacaatgttggttataaagccgtaaacaccttaaggggactccatttattaatagaataaactttatgaattcatttttttgtatgataatggcgtcatattcatcgcttgttgaaatttacttatgaaataactggtactgttaaatccaacttgataagacacttctgtcacattggattcagggtgttgcagtaataataagcttttttgaattctataatccattacataacgtaatggcgtcttattcagcattcgtttaaaataacggcagcactcagaacggctcagttggccagcttttgcaatgtcctctaatgtgattttttcagcataatggagatggatccagtttaacatttgtttcattcgatgactttttatcatttcagattgatcgtactctaattgaaaaccattaacgaccatgtttttccacattaacgttaattgcatcgtaatgtcaatctcatagagcgatgtcttttgttgaatcaattgatttatttttttaacagcatctagaatattttttgcccactgttgatttccatccaaaaataaatagggcaaattggttgaaaacatatagggctgaacatagcttgaatacagttcctgagataaaacgaaatggggtgacacatttaaacaaatatacgtacaatccgagccttccttttcttctgccatgtgcaggcagccgctattgataaataatccatccccttcgtgaacctctattttttcttcatttatttgaaagagagctattccttttagtatcaaaacaaattggatttcatcatgccaatgaagcggaatatagccatttatattttgattgatccttgtcttgtaacaggcaactggtaattctaccgttcggtgctctgttaattcttttaaattttgatcgatcacaaaattcttcattctgacttctcacctcaatatatttatattttttcattcgatttgagtattttttatcctattttgcatttattataacactattattatatttattagtgaggagtcatgtatgaatacttccaatagaagaatgggattgttctatgttataacaggggcgacatgttggggaattggaggcacagtagccaaaaaactttttcaagaatatcaaatcgatgtcaattggcttgtaacgacacgcttgcttacggctggaatgttacttttaatgctgcaactgttcagaaaggaccggtctcaggttattgaggtttggaaaaacaaagcgtcggctggccagcttctaatttttggcctattgggaatgcttgctgtgcagtacacatatatggcatccattcaacatgggaatgctgccgttgctacattattgcaatatttatccccagtaatcgtcattatctacacgcttttgcgaaaacaaacggttcttaccaaacaagatatcattactgttgtacttgctttagtgggttgcttttttttgttaacaaatggttcaatatctcaactttcagtgccggcagctgcagtagtatggggagttttatcaggattcgcggcagctttttatactttatatgccgttggtttattaaataaatttgattctcttgtcgttgtaggttgggctatgattattggcggttttgcattgggttttatccatccgccatggcaactggattttcaacgattaactgctgaggcgtatgcatatattttatttgtgatattatttggaacaatgattgcgttctggttcttcataaaaagcttggaaagcctttctcccaaagaaacaagcctattaggcagtttagaacctctatcagctgttgtaacaactgtcgtttggttaaaagcgccatttggttcttttcaatggattggtgctatttgtattatagggataactttaatattggctttacataaagagccttctatggagagtgaaaaatcgatattaaagattaggaatcatgcaaatcgggatatataggggctttttttgcttacatgaccggtccgacaatgaaaaacactggtggagtttgagccctctcggcaatatcaaaaagaccaagggttttgacgcccttggtattttttcttcaagaaccttcaatttttcttttttgtaattggtatccaaatttcacttttaaaagatggtgatgttacatccttatgctcgttccacaatatttctggaccttctatttgttcgtaatttgacgatggaaaccattcggaataaatacgtccccatacttcttgcagtgtatccggaaatggcccgattgattcgaatacagcccacgttgaggcaggaacttcaagccgtgagaaattatctggacactgtttcgttgtggctgcgccaatatagtgatcaagctctcctttttcctctgcccgaccttcagaaaaattggtggatgcactaatgagtcctgatggtgctacattagaaagctcttttagtttatttattgctttttcatctaaactttcccacatagatgcaatttccggattaattcctttgaaaataatatgaactctttttttaatgccaacgatgcgaaatgcctctttttcttcaatacggtagttcatttcatttcctcctttaattgttagctggaaggtcattcgtggataagctttaagggaatggccattaagtctggcttttgatgggtttatgccatgtaaattttggaatgcccgtgcaaaagaatcaggtgagttataaccgtactttattgcaatatcaatcacttttacattgctgtctttcagttcaaaagctgcaagagtaagacgtctgcgacgaatatattccgataatgaaatacctgcaaggaaggaaaacatccttttaaaatgatattcagagcagaaagcaagctttgctgcctcttgaaaatcaatatcattagtgaggttttcttcaatatactttaacgccctattcatacttttaagcaaatccatttatttggcctcctttaaccaaagaataacaggagtgaaatgtatatatccgacattctgtgcacagttttgcaggatgacttagatgaaataaagtaagtgattcacttgtatttgtacaggttttattgaagcatgctgttcataaaaaggcatcaataaaagaaagttataattgtcttataaacggcacattcatataattgagtgaaaaaggatgcgtatcatgcctatcaattcttttgaaaactatccgatgagctggaagccatcgattgataaagctgaaaagcctatttataaagcacttgcagggcaattggaacaggatattttaaacggagttttattacctggaacaaaacttcctccgcagcgagaattggctgattatttagatttaaatgtgagtacgatttccaaagcatttaaagtgtgtgagttaaaggggctgctgagtgcgactgtagggagcggcacatttgtatcgtatgatgcgttgtcgaatgcgtatttacttgaggatacaaagccgacacatttaattgaaatgggagcaatacttccagatcacgcttcatatgagcccttgttacaccaactgaaaaacatgattcaggaggaggattatgaaaaatggtttagctacggccgggcaggcgaaagcctttggcaaaaagatgcagctgtaaagctcatccaaagaggcggatttgaaacatccgttgatcacattttatttgcaaatggagggcaaaatgcgattgctgcgacattggcgagtctttgtaagcctggagaccgcatcggtgttgaccatcatacgtaccctggattaaaaactgttgcatcattgcttagtgtgcaaatcgtaccgataaaatcagaaaacgatgaaatgagtccggagtcacttgaatatgcgtgtaaaaacgaaaatattaaaggtttgtatttaatcccggattatcataatccgacgacttcctttatgtctgttgagaatcgaagaatggttgcagacattgcaaagaaatataatctatttgttattgaggatgcatcgtaccatcttctcaacaaaaatccgcttccggcactcgcctcattcgcaccgcaacaggttattcatattgcaagtttatcaaaatcgttagcgccaggcctgcgtttggcttatgtagcagtgccgagacaatataaggagccaatatcaaaggcgctttataatttaaatataaccgtttccccgctattagctgaacttactgctcgcacgattgtatcaaatcaatttgaagtcttaattgagagtcatcgtgaacaaaccattcgcagaaatcaactcgtaaaccgatatgttgcgggatatacatgtttaggtgttgaaacaggcatttttcgttggttgttgttaccgggtaaaatgtctggtgccgaatttgaagaattggctgctcgacatggcgtgcaagtgtatgcggctgaacgctttgtagtgggaaatagttgtcctgaaagggctgtaagggtttctgtctgtgcaccaaaaacacttgaagagcttgaacaaggattaatgatcctgagacgtttgctagacgatcttacctaatattgtttgccatacaattatgacattgtatggcttttttgtgcgtgttatgatgatccacatctagagggaggtttatacaaaattggcttttagaaaggaaggtcagatgatgttagacaaggacagcgtaaaagcaatagatgttcaaactgcttcattacaaagctacatcagttcaccagaaaaacaaaaatcgttatacaagcgtacactattcgttgtgagtatctcacaaatttttggcggtgcggggctggcggcaggagtgactgtcggtgcgcttattgcacagcaaatgcttggcactgatgcgtttgctggtctgccttctgcgttatttactttagggtcagcaggatctgcattaattgttggaagactttctcaacgttatggccgtcgaacaggtctttcggctggctttatgattggcggacttggagcaataggcgttattatggcagcaatcataaatagtattttcttgttatttatttcgttgcttatttacggtgcaggtacagccactaatttacaggcccgttatgctggtacagacttagcaaatcataagcagcgagcgactgctgttagtattacgatggtttttactacatttggcgcagtggcaggtccaagcttagtgaatgtgatgggggatttcgctctttctattggtgttccatcacttgctggccctttcattttagccgcagcagcatatattttagcaggtgtggtccttttcattatgcttcgtccagatccattagttatagcaagaacaatagaagcggcaaatgaagagcctggtgataaaggacatttggcggcaactgagcatacagaaaacaaaaaagggataatcgttggggcaacagttatggttcttacccaaatagtaatggtagctattatgacaatgacaccggttcatatgagacatcatgggcatgacttgggggcagtagggcttgttattggttttcatataggtgctatgtatctcccttcactggttacaggtgttcttgtagataggttgggacgtaccgcaatggctatttcctctggaacaacgttgcttttggcaggtgtaatagcagcatttgctccgggagattctatggttcttctcgtcattgctctttctttactcggattagggtggaattttggtttgataagcgggactgcccttattgtagattcaactgatagtgccacacgagctaaaacgcaggggacagtggatgttctgattgcgttgtcaggagctgctggcggagcattatctggaatgattgtggcagggtcaagttacctggcattatcatttactggagggatgttgtccttattactcattccagtggtggtatggtttaggggacgataaaggataggattgtttaatttacattaatttgttatattgttagataaagtctattgcgtcgtctaataatctaactaactatagttgctccattaaatctaaatcagcaattttggtataaagatttgtgaccaggattccttatagctgtgtcactcactgcatattctttaattgaatcacataaaatggttatcggatttgaaaaaggcaggattactcgctttaggtaaaggagtcatcacgttgttaaaaaggttttctcttgtttttgttacactaatgatgtctatcgttgttgttttagcggccgctaaagagtcgcctggagattatgtcatctcatttgatgaacctattatcttgatgatctcaattggaatcgttgtatttttatttatccctccattagtcatgtccttttttggcaatttggttgtaagaataatatctggtgtataccaatgttttatcgttttcacttttctggggctcattccaattggatttcttattcccaatggctttttgacaattctagtttctattgcaggaactttagtcagtatagctagtgttgccgtaaccttatgcattggcaagaataaaaaagatatataataattgaattgttattttttcagattgtcagtgaaatagtaaaacaagatgagaaggctttgtgggccttcttttttttgttgttgcatcatccccactttaagcttaatctattgaataataagagaaggaacctatagaagaataaaataaataacgagatgtcaaaaataaaactggacttcattattatcaattcacgtaaatgtaaaaagcttggaaagaggggaattctttcatgacaaatagcagaacgaatccgaaggttgatgaatttttaagtaaagcgaaaaagtggaaggaagaatttgagaagttgagaaccatcattcttgactgtgagctgactgaagattttaagtggatgcatccttgttacacatacaataataaaaatgtcgttttaatacatgggtttaaagaatattgtgcgcttctgtttcacaaaggcgccttattacaggataccgatggaattctcattcaacaaacggagaatgtacaggcggcgcgccagattcggtttacaaatgttcaggaaataaatgagctagaaaacattttgaaagcctatattcacgaagccattgaagttgaaaaagccggtttgaaagtggaagttaacaaaaatattgaattgaacattcctgaagaacttcaaaataaattcgatgaaatccctgcattgaaaattgcttttgaagctttgaccccgggacggcaaagagcgtacactctttatttttctcaagccaaacaatccaaaacccgagaatcgagagtcgaaaaatatgtgcaaaaaattctcgatggaaagggattaaaggattaggcacgccaaggttcaggctaaaggaatatcatcatagcgtaataagatcctttctatagaagaaaaacaagcatagtaagatgcttgtttttttcttaggacaacattcacttactgctgaaatgcttctaacattgtatgccactagacagcgttataaaatattaatgcaacacctagaaatagctcaatggtacggctcatcacatttagaatgcctaggagaactaatagaaccggaagatttttagcaagttactacactccaaactttgtttttgtattaatataccttattaaccattgtttttagtcaggtgcagacaaacgaatactgattaatgaatcatcatgatatcaatgagccgtttgattttttcatcgtcgcctgtatcaacgtacactgtttttctgttttttatgatactctcagtcacttccctcatgacgcctttttctatatcatcagcggaatcccagcgtaaaggcacattatatacatgaattgtgccatccccattgccatgataagtgactgatccatccactaaacgagaacctgccaactgggtcacattttctggatagctggcacttgtatcatcattaggattaattggctcgccagccgaaatatgtcgaacattcaattcatctatctcttgattaggtccaagttgaagccaaactctggcatattcaattttttccgaagagtatgctgccaatacattgtcttctttgcttttctcctctgctgaagaggtatcatttgcagcttttgttgcggattcttctgattctgttattggctccgcttcatccttgcgtattttggtgctgtcttcagtctcagtgtgtttttcgtcagtttgtacagcagaagcttgatttgaaggttgttgtgcttcttcatccttactgcccgtacatccagcaagcaaaatcatgagcagcagggcagtattgcaatagcatatcattctgcatttcttcattttttcattcctctccattaactcaggtcagcttcatatataagtttatgtatctaaatattaccatggaatagataggatgatgttgaaaactgtttaagaagaggaaacgatcttgaatagcatcgcgaaaacttaagaattcttaagaagttttgcccctttttcttcaggttttgaatgtaaagtgggatataaatgcaaaacaaatggagagattagatatgaaacgtctgttattcttatttcagtatatagtgaatccgagaactgttggtgcgatccttcctagttcaaggtatcttggagataaaatggtggatggaattgatttcaagaaggctgcatacattgtcgaatacggtccgggtacgggtgtattcacaaaaaaactgcttgaaaaaagaagacctgaaacgactattttattagtggagcaaaatgaagaattttatttactattgaaagagacatttaaagacgaaaagaatgtatttattgtaaatggatctgctgaaaatagcagccagtatgcaaagaattatggtatgccttatatagactatgtgatttctggccttccctttgcaagcttgccaaaaactgtttcagccaacattttattagataccgcaaagattttaaaaagagatggtgaattcattacttttcaatacactatgttgaaaaaaccgttttttgaacagttttttaccaaaatagatgtaaaaagagagcttagaaatgtaccgccggcttatgtctttagctgctcgatgccgcaaaatgatttggaggaattatatggagtcgaacgttcttattgttgatgatgacaaagacattagaaatctcatctctgtttatttagaaaatgaaggcctgtacactcaaaaggctaaagacgcaatcgaagctttaaacctgctggaacaaaaagaatttgacctgatgattttggatattatgatgcccaacatggatggtattgaagcatgtatgaagattaggcaagaacgaaatctgcctattatcatgctttctgcaaaatctgaggatatggataaaattcagggacttgccgctggtgccgatgattatttatcaaaaccgtttaacccattagaattaatcgctagggttaaatctcagttaagaagatataaaaaatacaatactgatacaagcagcacgaagaacatcattgaaattggtgacttgaccgtaaatacagatacacggcaagtatgggtgcggggccgggaagtcaggctgaccccaaaagaatttgatatactcgaacttctttgcatgaacaaaggaatggttctgagtgtggagaagatatatgaagcagtatggaaggaagacttttttaagtcggacaacactgtcatggtccacattacaaaaatcagagataaaatagaagaggattccaaacatcctatttacatcaaaactgtttggggaacgggatataaaatatgagaaagtttggaaataagctggttgcaaagcttcttggcgcgattgcaattagttttcttgtttcattgggtatgatggcactcattatattatcgaacgtctatctacaaaagatgaattatctcaaagagtttagcatccggagcagctattttatgatactgcttcagttttcggcagctattcttacttttattgcagttttttttatcatggcacggaaaaaaatattatatttgaagcttattactgagagtgttcatcatattgctaatgggaaattaggcttgaccattaggattgaaagtagggatgaattgacccagcttgcccaaaacattaatgatatgtccaaagagttagaaaaaaagtttgaacacgaaagacaattagaaaggtcgaaaagtgaactgatttcaaatgtatcccatgatttaagaacaccattaacatcaattatcggatatttggatttattaaaaaaagggcaatacgacagtaaagcgcaatttcaggaatatcttcaaacgattgattcgaaatcgcaaagactgaaatacctgattgatgagctgtttgagtatacgcatttatcgagcccggacgttaagttaacctgtaaaaaagctgatttgtcaggtttattggaacaaataataggagaatacattcctatttttgaaaaggaacgactaagtgttcaaaaatcaattgcagaagacaatgtacctgttgtaatggatatagaaaagatggttcgcgtttatgataatctctttatgaatgcgataaaatacagcaggaaaccatctgaattattcataagccttgagatcattggtgacaaagcacttttgaaaatttctaatcaagttgagggttttccggctgacaatatagacaaattgtttgaacggtttttcaggggtgataaggcaagaacagatcaacaaggaagcggccttgggctagccatttcaaaaagaattgttgagcttcataatggtaatatccatgcggattatagagagggctggatgagctttattgtcgaacacccattgtgtatataaaagcttatggaggaaagtttccataagcttttttctttagaataaaacttaagaaaccttaagaattttacggagagtttcttcattcttattgcttatcatgtaggtatggaaagtgaggagagtgtagaaattgaaaagtaaatttcttattatagctttgtggtttttagccatttatatagcaaaggaatatcatttactgtcactcgatatggatgatttacaggaatttatatcgttgaacacaaaatacgcaatgctgctgtttattgcgctctggatcattagacttctcttttttattccaggtgtgactctcatgtttttgggggagtatgctttgatccggttgtgagctttatattgtcgatggctggcatttttttgagcgaaaccttggtttacgttttttcaagaatgttttcaagcgggaacatgatgaaggatttagaacgtaaatatccagagttgaaaaaattattggagacttacaattataagtttttggcgctggggatgatttgtccaatagctccaacagatgtcgtttgttttttatcggcagctgtaggaatcaagtataccacttacattttaacggttatcgttacgaatatccctttattgatattttcgagtttcattgtgatcaattttagtgagtcattaatgggaactgtattggttgtcgcatcatttgttttggtttctattgtatccattaaaatgtggaacacccttaagcataaacggagcacatagaaatgccacgagactaaccatttatagcttataagcacctgtagagatttaagttctttcggtatccaatagtaccaagggttaacagcccttggtattattttctgctgcacatatataaaccctccattttcgcttgtagatccttttttatttttgtattttaggttgaatgatcaccagaagaaaaatgaacgcatgatctgaaaagctgttttgccgcaaaataaataacaccccgatgatcaacgataacaatcccgctactacgatatattgtgtgtctgattttgattactgtatataatcgttttttagtaaatgctctttcattttttgtatagccttcgcttcgtcagatccatttgcgtgtatatatattttggttccgggtttaattcctaaagccataatgtccatgatggcttttggcgcttgtttgaggttaacagttttcccttggtattcaagaaaaatatctgatgtaaaccgatgagctagtctgactaacagggtagccggtctcgcaaaccctgtttccttaatgatcgtaaattgtcttttaatcattcttcacctcattacattctgcctcttgacggatttatagttgggttgcagatcaaatttgaatttagagtacctttaggataagtgatctaatttcatcgaaataacactctttctttgtgtttacaaaataattctcaactaactaaaatggacaatgacttcattcgagaaaaaagcatgattcactatcagcttttgtttattattgtaaataaaaacatggtgtgtacaatggttacattcaggcgatttgttgattattcaacattccactctaaattgttgattatcttaagaaagtttggtgaaaagctatgtccaaagtggatagaagaataaccaaaagccaagaggctattaaaatagctctgattgagctgatgactgaaaaaagttttgatcatattacgattaaggaaatttctgaaagggcaaatgtaaaccggggaacaatctatcttcattacttagataaatttgatctattagaaaaaattatggaagagcatataaacaatatgggggatttttgtgagtcggcagctgaaatggactggattgaatcgactgtacactgcatggaataccttgagagtaattatttattcttttcgacgatgttagccagtgaaggcgctcgatattttcgcagtcagttccttaagtttaatatcgaagagttcaggaaagatgtagatgtaacgaaaggcaagaattacggccaaagtgaagatgtcattgttgaatttatagcaaatgcttacgtaggggtagtggaatggtggttaaaaaacgaaatgccttatccgcctcgtgtcatggcagaaaaagtgggggagttattagagcggattttataatggaggcaggaaatgggtgttgacttatttgtctaggcgggagattcaagtctcctcgatcgcatacaaaataccaagggccagcaacccttggtatttttataccttcatgcatttttgaagtttatgcttaaaggtctgccttactttgcaaatcgccgagctgctgcaacgcacatgataacggcgatattcactgctacgagtgcccagcccactttctcgtgcagaatcactgaggcaagcagcagcccaaaaaaaggctggagaagctggagctgcccaaccgccgcaattcctccttgggcaagacctcgataccagaacacaaagccgatcagcatgctgaataaggatacatatgcaagactgagcagtgcgggaacgccgatgtccgaccatgagtccggcgtaaaaaagaacgacaagggcagcataagaggaagcgacagaacgagtgcccatgagatcacctgccaattccccagacgccgtgaaagccttgccccttctgcataaccgagaccgcatacgacaatagaagccagcatgtacgcgtcgccaagcggggatgaacctcccccctgaatgagggcgaaacctgctactaacaagctgccaacggttgagaaaatccagaagacggggcgagggcgttcacccccgcgcagtacgccgaagaccgccgttgcaagcggaagaagtccaatgaagacaatggcgtgtgcggaagtgacatgctgaagcgctaaagctgtcagcaacgggaaaccaatcactacgccaaacgctaccactaataatgaaatgaggtctcttttggcaggatgctgctgccggaagatgagaaggagacctcccgccagtacaccagctatcgcagcgcggcaaacggtgagaaaaaacgggtcgaagtctgacacagccaaacgggtcgcaggcagcgagccgctgaaaatgagtacgcctataaaaccatttatccagccatttgttgttttgttcattataatcactccacatatctttcttgttcattgtctgtattttcttaacaaaaccagcagctaaggattacaatgactataaactggaattggccttttttaaacggccagttttcataaaaaaatgcataccagttaggagaacaacgtgcaaatggatatcacgccttttttgaatagaactctggatattccgctttatcagcagctttatcggtattttaaagaaaatatgcatcggggccgtattcaaaaaggaatgaagcttccttcaaaaagactcctggcgaatcagctttccatcagccaaacgactgtagaacgtgcctatgaacagctcgctgctgaaggttatattgtgagcaagccaagaagcgggtggtttgctgattatcatgattctgattttgcttatgatagaatgccaagcacaacacccattcaacaagaagcagaagaaaataaacaatggattgattttcattatggaaatgtagattcttcttacttccctttttccgcatggcgaaaaagcatggtcaatagcttagaccaatatggacacgagctttatcggccgggacatgttttaggagagtttgagctgagaacactcattgcagagtacctgtatcaatctcggggtgttcattgcggccctgaacaagtgattataggtgccgggaaccctattctgctgcaaatcttgtgccaagtttttgagccgaatatttctatagggtatgaggatcctggttatccaagagcacgcaagatttttgaagccaaccgcatgaatattgttcctataccagtcgatgctgaaggaatctgtatacagaagatcaaagaacagcagccaaaccttgtatatgtcacaccttcccatcaatttacgctgggaacaatcatgacgatcaacagaagaattcagctgctcaaatgggcggccgaacatcaatcctttatcatagaggatgattatgacggggaatttaggtacacaggacagccggttccttctcttcaagggcttgatcagcataaccgtgtcatttatatgggcactttttctaagtctcttttgccctcgctgcgtatcagctatatgattcttccttcacctcttttaaaaaaggggcatgaaatcacatccttatataagcaaacagtgtcctgccacagtcagctaaccctagctgaatttataaaaaatggagagtggcaaaaacacatcaacagaatgagaaaactttaccgcaaaaaaagagccattgtattagaggcagtgcaaagggaattaggagagcatgtcagaattcgcggagaaaactctgggcttcgtatcttacttgacgtttatttgccatttggcgaaaaagagttaattgagaaggcgaaaaaacatggagtaaaaatttatcctgtttctctttcttatcaacatcatcctcctgcaaaaacggtctcgctcgggtttgcaggggtttctgaatccgacataagagaaggcataaaaaaactgaaggctgcctggaagatatgagggagctttcagtttagcaaaaaggccaagtgacgactaagtgttgagagctgttcaatattatttaagtatatgatgagtgcctgcagtccaggccacgatacgtctgtttagcgaaaaacagaattttttatttgctcctcacagtgctaaaataaacaaaatagacaattgaaaaaatagaggtgtaagaatgaagttagatgagtttacaattggccaggtcttcaaaacgaaatcattaaaagtatcaaaagatgatattatgcggtttgcgggtgaatttgaccctcagtatatgcatgtagatgaagaaaaagcgaataaaggcagatttaatggaattatcgcttccggcatacaaacactggccatatcttttaaactttggattgaagaaggtttctatggagacgatattatagccggaacagagatgaatcatatgacattcataaaacctgtatatccggatgatgaattgtttacaattgttgaggttcttgataagcagccaaagagaaatgaattgggaatactcacagtattgctatctacttataatcaaaaagaagtaaaagtgtttgaaggtgagttatctgtattgatcaaacgataactcagaaagcccgcttttcgcgggctcgattgaagcagatgggggaaagatgttagcgagtttcctttgaaaaataagaggttaaaacatcataaacaataggcaaagaagtaaatccctcatcttctagaaaatgacctccgtgctgaacttcatataacgcagcatcaatttgttgtgccagatccttgctgaatgaaaaaggcacaatttggtcgtccttagaagcaatgacagcacggtgcttcgcggactcaatgattgtttgatgatcaaacgatccctgtgtaaattcatctaacatctttaaagtgggcaatgatttggcaaagccggaaacaagtatgattccgccaagctgttttcgtaattgaagatgttccaaaaatctcaaaatggcggggcaacctaagctgtgcgcaaccaaatacgtattttcatgtaaagtgtgctgatataaagagagtgtatccagccaatcctcaagtcttggctggagcggattaggcatgtttaaaatgtctgcttggaccccatctgcgagcagacgttttttcagccaagggaaccaatgatttgttgaggaggctctgtagccatgaatgatatagacttgttttgtcattatttcctcctaagaaatattttcattcagtataaaattcctctcattgggaaacaagtacgcacttttttgtaagtagctttacatatgaggccctccttgtgccattccccacttacacatctcatctatgaggggatacaaagatcgccctctgtcagataacgaatactctactttcagtggggtttgagaaacctcagaccgatgaataaggccgtcagtttgcaattccttaagctgtgcgcttaacattttatgggtgatgaagggcatagcccttttcagctcgccgtatctcatcgttttttcactaccctaactcatagagaattctcattttccatttgccccctataagagataaggtgtattcaaatggggcttgtttactgcggcacaggctattcattgtaatcaaacctccttttttaagtatcatatcagaataaattaggattttcggtgttgaagtttgagggcgattcacgatctgaagtgaaaggggccgcttgctcaacaggcggcacggtacatgaatgttctaagtcaaagagggttaccttactgttagttactttatttaaaaaaacgcatgtttttagctgaaaatatctattatggtatatttaaatataaagaaatatttgagaaatgaggaatggtatgaatacacccaaaaaacataagaaatttaaagcgaaaatgattctccaaatcatcatggttatcattggaggaatcatagcggcatatggactagaaacagtgctcattccaaacagtgtatctgatggaggggtgacgggtcttagcatcgttggttcacagctattcaacttgccgctggggattttgattgcagtgatcaacattccatttgtctggttaggatataagcaaattgggaaaagctttgcattattatcaattatcggaatcgtatcgcttgccgcggggacaagctttttccaccacacacccgccatcatagaaggagataccctgttaattaccgttgtcggcgggattatccttggattcggaatggggctggcgctgcgtaatggcggcgcattagatggaattgacatgcttgctgtgctgctatcccgaaaactgccattcggaacgagcgatctcattctattcttaaacctatttgtgtttatctttgtttccacagtatttggcttacaaggggcattgctttcagtcattgcttactacattgcatccaaagtgattcatgttgtggaggaaggcttaagcggctctaaaacctttcaaattattacaacccaacctgaattaatggtagagacaatacgtgatcaattaggccgaagcgccacatataaagaagcttacgggggtttttcccacgagaaatttaaagaaatcacatgtgtcatcaaccgtttagaagaaaccaaactaaaggaaattattaatgatattgataaatccgcctttgtcaccgtatatgacgtagctgaagtgaagggcagcaattttagaaatcttaatcatcactaaaaaatagaatgacctttttaaccgtaactgacatgccgcgggtaatttaatcaaaaacacttttttgagggcttgtgggtgtcaccagtgaaggtctgaatcataaaaataccaagggaatcaaaacccttggtattttttctggttattagattttatcttcagctttacgtgctgcttcgagcttatcaatcctgtctttatatttttctccccagtccttcatgtgcaggataacaggttctaatgttcttccaaactcagttaaagagtattcgacttttggagggacctgtttataaacctcgcggtgaatcacgccatcccgttccaattctcttaattgcagcgtgagcatacgctgggtaattttggggtatagttttcgaaactcattaaacctttttttaccgtcaatgagatgataaagaagaatgcctttccacttacctccgatgatatctaatgttgtctccaccggacatccttcaaagtcatcagaagaataatcaatgccgagtttacgatttctcaagctgttcactcctaatagtatactttttgatactatatacattcaatgtgcgtactttttatatattaatatacatcatataatgatgtcacatctaaggaatgaaaggaatggatcatatgaaaacactcgtactcgttgtacatccgaatatagaatcctctcgtatcaataaaaagtggaaagaagccgttttaagtgaaccagatgtaactgtccatgatctttatgaaaaatatcgcgatcaaccaattgatgtggaatttgaacaacagcagctcctggcccatgaccgtatcgtttttcagtttccattatactggtacagcagcccaccgcttttaaaacagtggtttgatgaagtgtttacgtttggctgggctcatggtcccggcggaaataaattgaaggggaaagagtgggtaactgccatgtccatcggttcacctgaacactcttatcaagccggcggatataacttgttttcgataagcgagctgacaaaaccgttccaagcatctgcccatttagtaggcatgacctatctgccttcctttgccgaatatcgcgccaatacaatcagtgaccaagaaattgccgaaagtgcgaatcggtatgtaaagcatattacaaatatagaattaaacccgaaggttcgcctgcaaagatatttgaaacagctggagggtgtcgatttaacataaagattgattttggaaaatcctgtactcaccaagcaggattttttcttgttcagcagagggattttaacatatagcgaaaaaagaagaagccaccaaaaataagctatttgcttggtcctgactgcttatttttggtgatatacttatttctctgtgatgaaataaagcaaagcgatgaccggaaaagcgattccaatccataatgctgtactccatccccctgaggcatatgcccatcctccaattgatgaccctatcgcaccgcctagaaagaagatcgccatgaataatccgtttaatcgactgcgaatttcaggcgccaacgaaaaaatagcacgttgactgagcacaaggtttgcagatacacccatatctaacagaatagctgcggccactagaactgttataccgacgggggagctgctctgaatcatgaggggtaataataaagagacaacgacaacaacgagagcgattccagtggcaagcctggttaagcctcgatcagccaggcggccgcctattggtgcagcgactgcacccgcaatgcccaccaatgcgtagagtgctattgccttctgagaaaaatgaaaatcaggaccggccaataataaaggaacggtagtccagaacaagctgaaagctccaaatacaaacgcatgatagatggcacggcggcgtaagattggagtcgtgcgcagcagcttccacattgaaccgagtaaggcagtatagtttgtatttgctgttggttttctggcaggaagcacttttgataatacgatggccaggataacacttaccacggcggacaaagcgaatattgcattccacccccagatatcagcgactagactagatatcggacgggaaagcataatccgagtaataagccgctcatgacattgccaacaacccggccgcgtgcagcgtctgatgcaaggtatgatgcaaatggaacaagcacttgggctgcgattgatcccaatccgacgaaaaacgcagctgctaaaaacagtgttccatgcttcacaaatgctgttagtgtcaaagccgctgcgcttagaaggagcgatacaacaataagttttttgttttcgataatatctcctaaagggacaaggaatagtaagccggcaacgtatccgatttgggtgagtgtgacaatcaatccagcaccgcttggagaaagtccaattgccttactaattaatccgaccaagggttgtgcatagtaaagattagcaacaatgataccgcatgcagttgcgagaagaagggttaaactgggtgaaatcctctgacctgcttgtttgtttccattagccatatgaatgaactcctttttaagtggttttttgagtgtaatcatgacttctcacaagtgattttataaactgaacgttcagtttcgtcgattaataaaaataatatactaaacgttcagttttgtaaatggatttctgttttctttttttattcaatttaagtatactgaacgtatagtttatattgcgggaaggaatgatttatgtgcagagtaaacgagggcggccgcgtgatgaaggaacgcataaggcgattctctctgcagcctatgacctattgctggaaaaaggcttcgatgcggtgacagtcgataaaattgccgagcgtgcgaaagtgagtaaagcaacgatttataaatggtggtctaacaaggctgccgttatcatggacagctttctttcgaccgcgacggacaggctgcctgtgcctgatacagggtcgtcagtacaagatatagtaacccacgccacgaatttagctaggtttttgacaagccgggaaggaaccgttattaaggaattaataggtgcagggcagttggatgaaaaattggcagaagaatatcgcacgcgatttttccagcctcgccgcctccaagcgaaaggccttctagaaaagggaattcagaaaggtgaattgagagagaatcttgatattgaagtaagcatagatctcatttacggaccaattttctatcgtctgcttataacaggggatgaggtgaatgattcctatgtgcatgatttggtgatgaacgcgtttaagggagttcaagctacctctgctacagagagtatgtagctgataagaactgcaaaagctgcggattatatgacaaattggttccatcgtacgtgaaatataagatttttgttgctgagcggaatcgagggaaaagttctcttatcggatgtcgaaaaagaagtcattcaatcgtgaatacataacatcatattattacattccttttcatcgattggaacaagggttctatacttcaatggaatatcgcaaagttggagtatttaaacaacaggggaaaatcgatggccattatgtaggtgtcatggcaatcgaaaaaatacttgcaatgtaaacaggcctctaaagagacctgttttttaatatccagatgattgtctagtttcagcttgggctctatgactactcccataactgaaatagtctaatatttataccggaatatttgatgttccaaatataagggattgtttatataaataaaagtttatataatgacgggggcgctaaggaaacgcggggagcgactcaggttttgttcgaagttttgatccttaagatatacggagcgctacatatggaaacgtaaaggggaatgtagaatcatttggcgtgtatataatgatttgcttatatattgatttgggaaggaggagctcatatgacgattgatgttgcggcgatgactcgttgtttgaaaacgcttagtgatcaaactaggcttataatgatgagattatttcttgaaaaagaatattgtgtctgtcaattggttgatatgttcgaaatgagccagcccgccataagccagcatttgcggaaattaaaaaacgcaggttttgtgaatgaggacagaagaggccaatggcgttattattcaataaatggttcctgtcctgagtttgatacattgcaattgatcttacatcaaattgatcaggaggatgaattgttaaaccatatcaaacaaaagaaaactcaagcgtgttgccagtaaggaggcattagattgacatcaatgattttggcagtattcatctttttattaactctagtattggtcatatggcagccgaaaaatttatctatagggtggtcagcctgtggaggcgcagttttagctctaatagcaggtgttgtcaattttcatgatgtgttaactgtgacagggattgtttggaatgcgaccttggcttttgtggccatcatactgatatcgttaattcttgataatatcggtttctttgaatgggcagcgcttcatatggctaaggctgcaaaaggaaacggtgtgcggatgttcgtttatgtatctctattaggagctatcgtcgccgcgttatttgcaaatgacggtgcagctcttatattgacaccaatcgtattagcgatggtcagagcattacattttaatgaaaaattagtttttccttttatcattgccagcggatttattgcggataccacttcgcttcctttagtagtgagcaatttggtcaacattgtttcagcggactattttcatattacgtttattgattatgcatccagaatggttgtgccgtacttgttttcgctgctggcgagcatcattgtactttaccttttctttagaaaaagcataccaagacgctatgatctgactgaggttaaaaaacctgttgaagcaattaaagatcaaaacatgttcagactgtcatggtatatcttagggctgctgttaattggatattttgcaagtgaatttttttctatccctgtatcagtggtagcgggcagcattgcgatcattttcttaatcgctgcgcaaaagagtccggccgtccatacaaagaaagtggtgaaagaggcaccgtgggctatcgtattcttttcaattggcatgtacgttgttgtgtatggtgtccgaaatgccggattaacggatgtcctttcagatgtgattcaagccgcagctgatcaaggattgtttgctgggacaattggaatgggctttattgcggcgattctttcttccgttatgaataacttgccgactgttatgattgacgcattggctattgccggtacagatacacatgggatgatgagagaagcgcttatttatgcaaatgtgatcggttcagatttagggcctaaaataacgccgattggttccttggcgacattattatggcttcatgttctttctcacaaaggtatgaagatttcctggggcacgtattttaaaacaggaattatcctcacgatacccactttattgatcacacttgtcggcctgtatatttggctgctgataatccattcttgtttctaaaaggacaaggtcactatatcaaggaaaacaatgcactggtaactcttgacgcagccaaatggctgaagggtgggggagaaaataccttggggctaagtggaatgtgtacagcgcaggaatcgaagctcatggatgacatcgagtgctgttaaagcaatgaaagaagcagggattgatatttcaaatcaaacatcggataaatttgatgatccggcaaaagcacacggaacagaagaagtgtttccaaagggtccgtgatgaaattggtgaccgtttaaaacagtttgctgtaactggagaataaagaatcgatatactcagcgttttcttgggttatataatgcaatgtgttgttcaacaggtgtctgcgggctgagtgcaaacacctgtttttgttttttatttgtctgagattcgtaacagggaagttatttagctggtgacagaggaaaattgattttgtgaacagaatcatgaaggagacggtgttttaaaggagttgtctgttttgcaggaattaacaaaagaaaaatacagtagcttaaaaacaatgtttgatgacaaatattgtcccacatttgtctattcaatattagaccaaaccattccgggagctgtttatgcagatgatcaaacctttcctaaatcgttttttataggaactgaatcaggcatttattttattgcgggagaccaagggaatcgggattttcatgatttcattgcaggatattatgaagaacaagtgaaatcatcaaaacgatttaccttgttttcttccagtgatacatgggatagcgtactgaaacccatactgaaagatgacttaaaccaaatgagaagagctgcattttcttatcaaccaaaatctttcaaaaagactttgcaactgccaaaggggcttgtattgaaaagaattgacgaagacatcatttcacatagcacagcgtttaacagcgcgtattatgaggagtattggaattctgtctcacagtttgcttcaaaaggttttggatttgccgtattacatggcaatcacgtagtaagtgagtgtacctctatatttttagggcataatcgagcggaaatggatatctatacacttgaagaatatagaggactggggttagcttattgcgtagcaaataggtttatagcgttttgtatggaaaatgggattgttcctagctgggattgtgatatttgcaacaattcgtccattgcattagcagctaaactagggtttaagacggtaacggaatacactatttactactctggctaaccttaatgaaagaaccttaaaaggagataccaaccgatgttggtatcttttttgttttagagtttttttacccttttagcagaaaaatgggtgatgaaaatcttattcattttatttacttttaggtaggtaaaacataccccgccaactgtaaccactccgcctagcagagagagcagtgtgggtatctcgccgatccagagccaagatatgatcaaggctaaagccggtgtaacataaagtgaaagggttgcttctgaagcaccgacgagtgaagtgacatatgctagtgcgaagtaaggaataaccgtcggcaataatcctaagtaaacgatagacaaagttgcgcttattgaagcgttcatcatctcttcgcctaagcctggcagaaacacaagcataggtattgttccgccccaaatggtgaatgtaacgaatggaataaaaccatatttttttatatagcgggcttgaaaaacgaaataaatactctccgaaaatgctgccagcaggatgaccaagataccgctcattgaatatgtaaagtctcccgccccaaatgcaatcaataatacacccaataaactgatcatagagccaagccatttcgtaaatccaaaatgctctttataaaacaggcgggatagcatggctgagaagatcggtgccgtagtaacgagtaagcttgcaactccggcactaactgttttttcaccgatgttcagcaaaatgtgatagaatgcaaatcctaaaaaccctaaaagaaaaatggcaggaatgtctttcaagtcgggtaggcgcatctgagtcaaaacagcaaaaagcaataatgccatagagccgattaacaaacgaaataaagcaaggtgttctggcgtgtacccttcaagtcctgcgcgaattcccggaaaagcagatgcccataaaccaatcatgagactatgagatatcattatttgaactgttttctttcgcattcctctcactcctctttacaaaaaccaaccagttatttaatgtgtttctatactaataaagatttgatgatatggcttcaaccagttcaatagattttgacccaaccaatttattttaaggagaccgattctatgagctttccagaagaaaaaaagatgaaaaagctccctaagtacagacaaatcgttcattttattaaagagaaaataggaaatggagagtggccgattggaagcaagattccaagccagcgcacgcttgcaaaagattttcaggtaaatcggagcacagtgattacagcgttagaggaattgatggccgatgggctaatagaaggcacaatggggaaaggcacagttgttatcaacaacacatggacactgatggctaagaattctgctcccgattgggatcaatatgtcacctctggcattcagatgccaagccgaaaaatcgttcaagagataaatcaatcagaatcaaatacagaccttatacagctcagtaaaggtgaactttcagctgagatttttcctttggctgttatgaaagagatgatggggaaggtatctcaacacatggaggcattcggatatgaagaaccaaaaggttacttacctttgagggaggcattaagcaactatttaaaaaccattggaatcaacgtctcatcttcttccattctgattgtctcaggagcgttgcaagccttgcagctgatatcaatggggctgttacaaagaggatcaaccgtttatcttgatcagccctcctacctttattcattacacgtatttcaatcagctggtatgaagctgactggacttcctatggataatgaaggacttttgcctgaaaatgttcatttaacaagaggagagcggggaagggctatcttatatacaaatccatgttttcacaatccgactggtattcttatgtctaaaaagcgacgggaagaaatcctagcagtaagtgagaatacacagcttcctattattgaagatgacatttatcgtgagttatggatcgatgaaattccgccatatcctattaaaacaattgataaaaatggacacgtactgtacataggaagtttatcgaaaacattaagcccaggtttgaggattggatggatcgtcggaccggaaccggtgattgaacgtttatctgacattaaaatgcaaacagattacggatccagttcgctatcccagagagtagcggcagagtggtttacttccggccactaccagcagcatgtagaaaaggttaggcagcaattaaaggtgagaagagaattggccttgagtgctttagaaactcatttgaaagaagtggcgacatggaatatcccaaaaggagggttttttgtctggataaaaatattgccttccatatcaatgaaattactttatactaaagccttatcaaaagggattctgatcaatctcggcagtatctatgctcaggaaaaagggaattatattcgcttatcatatgcttatgcatctcttgaagaccttcaaaaggggatttatgagttgggtttaatgattaaagaattggcaagcaggtaacttttatatccttaaatggatgtttcactaaaaaagagatcaagcctaatgatcgcttgatctgataataacaagggttactagaatagaccaaatcatggttcggtcttaaaataatcatgtctctgaacgaaaagtctttccgacttctcttcctaaaccaaagtagtgtctgaaattatagataagcgggctccatttggaagggttgatatggttttcgtccagaatgatactttcctcggcatgaaaatgtagtgcctgcgtctctacaattgcgaatgacgattcatattctggaagccgaatgtgtttcacttcggcttcgatttggatagggcattctttaattcgtgttggtgatactgtttttgattgtaaaggcgttaaccctgctgcctcgtatttttcttttttatatgtaaatccgagctgcttctttaaaggcggtatactcttttttccgctataagatgaaattctttcaacgttttcccataaatccgggccaggcaagtttatgacacactctttgtgtctttccaaattgtcgatggcttttcctcccagtcctactccaaggattatataatgtccaagagcccaagaagaagacataggactaatattagtggttccatcctcattcaatgtggttagaagaaatgtcgaggtaccataatacatgatcttgggtttgatttccttaaatcgacgagtgtcttgttttttgatgtccaacgttttttcctccttgtcacgcttacatttatattgtaaaggattaacatttcaactatcatcgaaatatgaatgtaaggaggaaaatcatgaatcctaatattgcaaaaatctcttcgttgctatcagatccctcgcgttcttccattcttctcagtctgatggatggaaggatacaccctgcgggagagcttgcatatctcgctaacattaaacctcaaactgcaagttttcacctgaataaattgcttgaagcaaagctgattagcgtagagaagcatgggagacatcggtattacagattggctgactcagatgctgcaaatgtgatcgaacaattgcttcatattgcgcctaaagcaaaagtcacatctttaaaagagtcaaaagagaaaaaggacttgcatttcgcccgtacctgttatgatcatttggcaggttatgtgggcgtgcaaatggcacattcattagttgagcaggggatgttaaaaaaagttgatttaaactttgaggtgacttcagagggtgctttattcttttcaaagttaggcatcaatgaagagcaacaacggaataagaggagagcctttgcccgctgctgtttggattggagtgaacggcagcatcatattgcaggagcattaggaaacgccctattggtgcgcatgttagaagaagagtggatcgttcgtatgcctaaaacgagagcgattaggattacacaaagcgggaaaatcgcgtttgaaaagcacctaaacgtgaagatttaggatgttgaagcgaaggcacgatatccaggaggaggagtaagatttgttctaatcttactccttcttcttattttgaagcagctcgattccccattgcaatagagatgcggttccaactgtttatttgattaatgatcagaacaaggtcaacataatgtttttcatcataatgttcccgcacccgatgatatagctcatcaggaacccttttagatggaatgagcgtgatgtgttcagatagttcgagagccgctttctcttcaggtaagtaaaaatcacattcattccaagcatgtaaacagtaaattcgctgttcagtttcccccattttgcgggcatcggacgtatgcatatctatgcagaaggcacagccgttgatttgagagactctgattttgattagttctctcgtcgttcggttaattgaggattgtttcgtgtatttctccatatccatcatgattttcataccttcaggtgcaatctcatagtaggacactctttgactcataaggcaagactcctttccattgaatacctagattgtatcccggtattgatcattttaccaatgtgcggtttgaatgacagctgtttcagcgtcttttggaaagaagtttctttgaataaaaataagggtagccagcaatgatgagtggggctgctaatgcaagcagtatccatgagcctgattggctgtctctagtgactctaatgaatatataagtaccgatcagaaaatataataaagcacctagaaaccaatacatgttcaatcctctttttccttgctttttggttgcgcatttttgtctgtcatatggcttaatcgatcagggttctgattttttaataccttttcggtccggattccttttctctttaatgataaaattgtgagatcaatcgatttcaatgatgatcattccttcaatgaatagtaagttccttatgattttaaaggtaaatttgaaaagataaaacgtacatagaggcagaacgttcatgtacgtttgggcaatgatcacttattggaaactctaatgtttccctgcacctgatattgttgtgttccttctcttcctataaaatgattggatacatgtatgtttgcacgttgaaatatgggttcgattttcatgaatctctattcggtgaaacaggtaaaggaagtggataaggtttgcttataaggaatccttttaaagataaatattactcacatgataggcgggcattaaacatgcttgcactcagagtgccgggcctggcttttattctcatgatctatatagcctctatcgtgctgcaatttgtttctgggggctggtccattttattgctttatgcgtttaccatattaatcgccatttttgctttgcttcattggcactcatatcgctgggttaagaaaagagtgattctgtatttcgcggtacaaggtttgatcacctttgcacttgctaatctcatgactggcttctttatacttgtcattatcggcctttatgcatttttaattggacaaatcataggaatggcagacagaagaaggacttttctcattctttatctattgctgctgctggtcataaattcggcgtttcaccttcataaaggtgaagttttgcattttattgttattgctgggccaatcatgattgtcatcatcacttatgctgcaacattttttgcccaagtcgatgaaaaaataaaagctcaattgactcttgaaaggctggagctggctcatcagcaggtagaacagctgacgctgcagaacgaaagacagcggatggcccgagacttacacgatacgcttgctcaaggtcttgtcagtttaaatatgcagctggatgcgattcatgttcatctcgccaaaggcaacacagagagagcgaaggaaatcatacaacaatcgatgaaaagagtgaaaagcacattagctgatgcacgttcagctattgacgatctccgcagcaaatcagaagaaatcggtgttttaaaagaaagaattacctcgctaatggatcattttatagagtcgacaggcatggcttgtttattagattacagattgcatcaggtgctggatgtgcgtacagctgaaaactgttattacatcattggagaatgcatgacgaatgcggcaaagcatgctgaggcgaaaacaatctggatatccatttgggatgatgaaaagggaaggctccatttaacagttaaggataacggcaagggatttgatgttgaaaaaggaaagaaaaagagaggacattatgggcttcttggcatacaagaacgcgtcagggcaataaatggccaattcaatatcaagagtacaaaattgaaaggaacacaaattgagatcactgtaccaattcagggagagatgcaagatgaataaggttttaatcgttgatgaccatcttgtcgtgagggaaggtctgaagcttttaattgaaacgaatgatcaatacaccattataggagaggcggaaaatggaaaagtcgcagtccgtcttgcagatgaattagaaccggatatcattctgatggatttgtatatgccggagatgagcgggttagaggccattaaacaaataaaagaaaaacacgatatccccatcattattttgactacatataatgaagatcacttaatgatcgaagggattgaattaggagcgaaaggatatctgttaaaggatacgagttcagaaaccctttttcacacaatggatgcagcgatcagaggaaatgtgctgttgcagcctgatatcctcaaacgtctgcaagaaatccaatttgagcggatgaaaaagcagcgcaatgagacgcagctgacagaaaaggaagtcattgttctaaaagcaattgctaaaggtcttaaaagcaaagcgattgcctttgatttgggcgtctctgagcgaacagtaaagtctagattaacgtccatttacaataaattaggcgcgaattcaagaactgaggcagtaacgattgccatgcaaaaaggtattctgacaatagacaactaaactgcatatttgaaagttgcccaaacgtacatgcccgaatgtacgtttttttcatttcattgtcaactacaatgagaaagaatgtgatcaagcaatgcgttgaaaggagattatcatgtcaaaaatgttatatacattaggaggatgggttgctcgcaatcgcataaaagcaatatgtgcgtggatcgttgtgttagttgctgcgataggccttgcagtgaccttgaaaccaagtttttctgaggatatgtccatacctgacacaccttcggaaaaagcgatggatgtgattcaaaaagaatttcctcatggtcctgataaagggagcatacgggttattttcggtgctggtgatggggagaaacttactgggaagccagcaaaaaaagcaatagaagatacgttcaaagaaatcagtaaagatgattctgttgactcgattgcaagtccttttgtgacagggacaatcgcgaaagatggcacagttgcctatgctgatatcaagtataaatcatcagcagatgatataaagaattactctatcaaacacttaaaagacagtttgaaactggctgatgatgaaggattgcaaactgagctaagcggagatgtaccgggagccgagatggagataggcggtgtctctgaaattgtcggcattatcttggcttttgtcgttttagcccttacattcggttctttattaatagcaggtttgccgattttaactgcactgattggtttaggtgtaagtattggactggttttgattgggacacaagtatttgatattgcttccgtcagtctttcattagccggaatgattggccttgctgttggtattgattatgctttatttatttttacgaaacaccgccagtttttaggcgaaggcatacaaaagaatgaatcaattgcgagagcagtgggaacagcgggaagcgcagtcgtttttgcgggacttactgttatcgttgcactttgcggattaactgtcgttaacattccttttatgtctgcgatggggctgacagcagggcttagtgtactgatggctgttttggcttccatcacacttgtgcctgcggtcttatcgattgcagggaagcggatgattccgaaatcaaacaagaaaatagaaaaacaaagcactgaaacaaatgtctggggacgctttgtcaccaaaaatcctatcatgctaagtgtatgcagcattctgattttgatcgtcattagtatcccatctatgcatttggaactgggcttgcctgatgctgggatgaaagctaaggataatccggatcgccgggcatatgacttgcttgccgaaggctttggagaaggatttaatggccaattaacaatcgtagcggatgccacaaatgctacagaaaataaggcggaggctttcgcagatgcagtgaaagaaataaagggtttagaccatgtagcaagtgtcacccctgtaatgcctaataaagaagggaactttgccatcattacggtcgttccggaaacaggtccaaatgatgtcacaacgaaagatttggtacacgatgtacgcagtttgtcagataaaaacggagtagatttgcttgttactggatcgactgcagtgaatattgacatttcagatcgcctgaatgatgcgataccggtgtttgctgtacttattgttggctttgcgtttgtattgctgaccatcgttttccgttcgctgcttgtgccgcttgttgctgttgcaggtttcatgttgacgatgacagccactcttggaatctgtgtatttgtcttgcaagacgggaatctcatcgactttttcaaaatacctgaaagagggccgatactcgcgttcctgccgattttatctattgggattctgttcgggttagccatggattatcaagtattccttgtcagcagaatgcgtgaagaatatgtaaaaacaaacaatccagtacaagccattcaggctggattaaaacacagtggtcctgttgttacagcagccggcttgatcatgatcttcgtttttgcaggatttatctttgcaggcgaagcttctattaaagccaacggattagctctttcctttggtgtgctctttgatgcctttattgtaagaatgacactgattccaagtgtcatgaagctgatggggaatgcagcttggtatttgccgaaatggttagacaagatgattccgaatgtggatatagaagggcatcaactgacaaaggaaatacagccggaaatagatcatgaacaaaagaaacaaatcagtgtgtaatagaaaaagcagatctttaatgatctgctttttttgcatatggtagtatttagaagatgaagtcggcagttaaaaggagacacttatggcgccatcactcattttcgatatggatggaactttgtttcatattggcagaagctgcatcatactagcaggcatcccaggagaagtgacatgattttttgactttgcattcactacttgatgccaaggatcttgagaatccttcttgaaaataaaggattttacaactgatcatataagaaacctaaagaaacaagcacacaaaaccagctgcgggttttgtccaagaaaaatagagtccatgagagagactctattttttgaaatgcccggctagaagtatattgcaggtctttatgaatgcaaaacactatcttataagcccttaccgtgaaatgcctgtttctgcattgaaaaaacgcattacacgttcatttacgtaagcgggttgttccatcgataaaacatgtccggcatttttaatgacttccgcctcaatatcaggaacgaatgaagaggctcggtgcagggctgagtggggatcatagatgacttcatgttcaccaagtaataataggataggaactcttgctgaacgtaattcctcatcggtaaaaacatacggaaatccgtctgctttaggatttggatttcttgatccatcctgccacattacccctgcctgaaactgcttcacaaaaatcgggtgcagcacattctgatcattcatcatccaatttaagaatgtttcaactccatttgacgctgtaaggccaagagcgtatttgtagaaatcgtgatgaaatggcaaaaacgtttctgccggactcagtatagctgcgctttttactctctcaggcatacgtaaaaggaaattcatcgtatggagaccgccaagcgaaagtccgatcatgtgggacttttcgatccccagattgtcaaacacatcaagaagccaattggcgtaatccgttcttgtaccgcttaaattctcaggaatactcttgtttttatcacctatgatatcaactgcataagttctgtatttgctgctccaatcggcgatgttgggataccacatcgtcgagctgaataatgctccgtggagtaatacaagcggcggggcatcctctgggccgcttgcaatcacatgtgtttgaccaaaacgagtagatatatagaatgatttgcaacggaccggccaaagactaaggctttcattataagtttgataatagcggataccgttgtcacttaattcgggaatactagatgaatggtttgacatacaaatgcccctcccaacattgtttaaatgaatgtgccgtttcgtgatggggaatctgattttgatataacagactttatttacaatataatacagttgttgttagacgtcaaatccaagatgaaaaggaaataaaacgattggaacagattattgaaaatcaatataacagaatattaacctcctttgtggagccgcttcattaaaaccgcaatccaaatgcatgaatcacaaaaatcacaacaggagggatcaagagggaaggcagcaaattcaatgttttgaacttcttgattccaagaatgcttagacctgaactgaggatgagtatgcctcccacaattgtgatttcattaataaggtctgtattgattgcgctctccattactttagcaaataaatagatggagccttgccaggcaaataatacaatggctgcagccgctattccaaaaccaaaagttgaagcgagcacaatggaggtgatcccatctaacatcccgtttgtcaggaggtatgtataatctccatgcaaagcggcttcaacagggcccaatattgacagcgaacctatacaaaataataagaccgcagtagataagccctctgctaaattacttttagaaaatttgttcaccagcttgttgaatcgtaattctaaattgatgatctggcctagcaaacctccaatggctaaactcacgatgaatagaatggggtatttactatcaggcaaatgctgtgtaatggcgttgatccccagcgcgactgcagcgaatcccattgcctgcatcaaaatatcctggtattcatctttaatgccttttttgaatatccccccgattatgcttcctgcaatgatcatcactgtgttaaaaatcgttccaaacataagctttctcctccaaaaatcattcctgcataaaaaataaaccctctagttagtagagagtcaagggagatcaaaacatattcatgagattatttgatgggcagcaggatttcagtcacgtaattatctaggttattcgtaatgccataatcaatgagtgtgatttcgattgagtcccctgctacttcataatgatgttctttcatatatgccagtaattttttgtagtatggttcggcttctggatgtgaccctttaaacctaatttgcagatattctcttgaaggaaagatgatttctgaagaagttttttcattttcatcttcaagaatcataaatatactggaatatttgtcaaactgttttgctttcacatttgctgcagaaatggataaaccgatcttgcctatgaatatatcttcgtttacattcaggtgggttctcaattcagctaacgaatgttcgatatcatggccgagaacatattcatgctgcaagtaagccacacgcattgcgggaagtttgatttttgaaatttgatgtaacggcatgttaacggcatcttctatatgtgtgatgcgtcgggagatctttcgttcgatgcgttccaattctttctttttgcgatcaatttcagcctgctggctttttagtaaatgaagaagagtgtttgtattttgagagttataaaaatcaagaagcttattgattggcaggcctagggccctcaaatacttgatggtatcaagccgctcaaactgttgggtagaataatatctatagttcgtttgctcatctttatattccggtttcaaaaggccgatttcatcataataccgaagagcagagattttcacattgaataactttgacacttctccaatcgaaaaaaattccttcattctaacaacctttctgtgcctatgattgatatacacacattatatagtacggcgagttctaaaggtaaagtttgcatcataaagaaaaagctccttctaaaaaggagcttttcactcttcgaaataaggatttacatggatgagcacttcttctacatctgaaaactgtcttttgatttcatttcgaatttcgcgggcaatatcgtgtccctgcttaattgtcaaatcatgatccaaagataaacggacatcaagcaatttatagtggccatgttctcgcgcgcggattctatcaattcgttttacttgatcacattgaaaaataacagctttatattcctctatcagctcgggatcaacactcttttccatgagcacatcaacagacggcctgattaattccattgaaatcttaaaaatgaggtaagcaacgattgcactggcaatggcatcggcgtacaacagataggaccatccgcgggtgtttccgatgatagccaacaggacgccgataaaagcggcaagagaggcaacgatatcgcctttatgatcgtacgcaatcgctataatcgctttgctgttccatttttccccttgctttatagaataacgatataagatttccttagccacgtacgaaatcagagccgcaaacaatgcgctgtattggggaacgcttggccctttaacaaaggacagaatcgcttctatgaggatataaacggatacgatcactaagataattcctacaatcgcctcactaatgacttcagcttttccgtgaccaaaaggatggtcttgatcgggcggtttattggaaattccgatcactgccaagactgcaatcgaagcaacgacatctgccgcggaatgtattccgtctgcaaacacggcttcactatcgcctaccagcccaaaaaagacctttcctgccattaagatcagattggcgatcaatgcaatcaaagcaacttttctgcttatttgttctctttcacttgccattttttcctcctataaaactgcacaaaaaaataggagtgctctatatacgctctccgtatcctttcctgtgtaatcactttgtttatcataccaattcaatttcgagtgggtctatagcaacgttgtttcctgtttactaataaataaggtgacagaaaaaaagttggagctatgctaaaaaggtcatacagcaaacaaatgagttcttatgtaacaacagtgatgattcgctattaaaatgctgccgtcagtgaaaaatttccacctaattttcaaaaacctattgacatgagaagatctgtattttactattatctcatattcaagatattttaatttgagatatttggtcggaaagatcagcgatcaagcgcatctctaagtgttcaatccgttgtcatttcttttacacaatattcaatatggattttttataataaaatatctcgaattcgagataaaagggagtgtatcgtaatggctgaatttatacagttagtcaatgaaagacgatctgcaagcaattttctttcaggtcatccaatcacaaaagaagacctcaatgagatgtttgatttggttgcattggcgccatcggcttttaatttgcagcatacaaaatatgtggcggttcttgaccaggacgtaaaggaaaagctgaagcaggccgcaaatggacaatataaagtggttagctcttctgcggttctcttggtattaggggataagcaggcatatcaacaagcggctgatatctatgaaggtttaaaggtattggggatattaaataagcaagagtatgaccacatggtgcaagacaccgtttcgttttatgaaaacaggggagaacaatttaagagagatgaggcgataaggaatgcttcactttctgcgatgatgtttatgctgagtgctaaggaaaaaggctgggatacctgcccgatgatcggctttgatgcggaagccgtaaaacggattttgaacatagacgaccaatttgaggttgtcatgatgattacgattggaaaagaaaaaacagagagcagaagaccgcgcggctaccggaagcctgtgaatgagtttgttgagtatatgtaaaaggagcggataaaaatggctaaaaaaacgatgggaattcatcatattacagcgattgtcggtcaccctcaagagaacacagatttctacgcaggagtgcttgggcttcgtttggtcaagcaaactgtcaattttgatgacccaggtacgtatcatctttattttgggaatgaaggcgggaagccgggaacaatcattaccttctttccgtgggccggagcccgccaaggcgtcattggagacggtcaagttggcgtgacttcgtatgtcgtgccgaaaggggctatggcgttttgggaaaagagactagaaaagttcaacgttccctacaccaaaatcgagcgctttggggaaaaatatgtagaatttgatgatcctcatggactgcacttagaaatcgtggaaagagaagaaggagaggctaatacgtggactttcggagatgtaacgcccgatgttgccattaaaggttttgggggtgcaaccctattatcagcgcagcctgacaaaaccgctgaccttttagaaaacatcatggggctggagcgagtcggcaaagaaggagacttcgttcgttatcgttccgccggtgatatcggaaatgtgattgaccttaagttaacgcctattggccgcgggcaaatgggggccggaacggtgcatcacatcgcttggcgggctaacgatgatgaagatcagttagattggcaaagatatattgcttcgcacggatatggtgtaactcctgttcgggatagaaactactttaatgccatttacttcagggaacacggggaaatcctgtttgaaatcgcaactgatcccccaggctttgcacatgatgaaacacaggaaacaatgggcgaaaaactgatgctgcctgtgcaatatgaaccgcatcgcacacaaattgaacaagggctgctgccgtttgaagtaagagagttagattgatttgacacataaaaaataaagaaacatatattcaattgatgattgctggataccgtcagcaaagaattagataaaatcaaagatgaggagagatacaaatggaagatgcaggactgttgcttattcgtataatgattggtgtggtgtttttgttttatggcacacaaaaattattcggctggtttggcggatacgggattaaaggaaccggacaatggttcgaatcaattggggtgaaaccaggaaacgttgcggccgctctatcaggtcttggggagttagtaagcggaattctatttattttaggcgtattcctcccgcttggagctgctatcataacgatcatcatgttaggtgctatcgtaaaagtccatggagcgaaaggttttgcgaatggcgccggaggttttgaatataacctggtgctcattgcagtttccataggggttgcactcatcggttcaggagcttacgctttgcatttttaatacgaaagtatgtaagaacagttgcagcttgtcggtaactgttcttttattttgacattttcggcaagcttgcaggtactctgcaaagcaaaaaagcggatataataaatataaatctgtatagtgaatgatacgtattgatgagcttggtcatgaaaaacagacctatttgaaggagtaaatggatgaaagagatgacagaattacattcattagtttttatagaaaactttatcaaacagcacaaattcagttttatttatatatcaaggcctggctgttcagtatgtcacgcagttctgccccagctcagaatagtattggatcagtttccaaacatcaaattggggcatatcaatgctgacgatgtagcagaggtcgccggcagattttcagttttcaccgttcctgtgcttcttttgttcattgatgggactgagtttctaagagaagcccgttttgttcattttgaacagcttgaacaaaagctgaaaagggtttatcgattatatgaaggcgaataaagaaataaggcaaaaaaaagaactcaaatgagttctttttttttgcatcaatttattcttcactaggcgaagaagggttatcaacctgcccttgatcacttgtatcattatcacaacttgctgaaataataattgaatgagaaggagagtaatctcctaatgtgaaattgacaccgtaatttttgctgttcgcagtatggctgttttgcaagttatgtccgatatctgtattggcgttttgtgtcattccatttatcgtgagatttgagatgttgatttgagatcgcatgcttcaaaaactcctttcactcagaagtagccgtcatagaggacgctggcagtctatttacttctatgatattgcgtttttatatcattgcatcaacataatggtaaaaataatagcgagtgaatgagtctcttttgaagatgatcaacctatcagcagaaataaagccgcctgataaagaggcggcagatcgttatatgtcatctatgaatttgatgtatcgtttttcgtttgcctaaaggatagaatggtcgtttttaatgatgagtaggagcctatagcagcgtagccataaaaccagcccataaatacgccagaaaagaggctgtgtcgatggcttatgaaaacagaaatgacaaggcctgttattaaggcaactgacggtacaaaagttttggggattttcaataatattttgaggatttgggttatcaatatgatgattggaacagctatcacagcatcccaaaagttcgtgtgaataattggaaaagccatacggcacctcatgaagtgtttatttcttaatttttacgctaaaagcttggaaagcagctcttggatcgcatatgttacattttgggcttgattggcggagcttgtttggcttaaagtattggattcaaaaaccaaacctgtattactcccaccggaaccctctgttgttttagacacagagaacgggctgatggaaactgcaaatccgttattaaaaacgctgttcccggatatcgaatgaatataaactgggaatttcatcattcatctctcctctctgttatgactgtttatacaatatggtgtgtgagcagcagttgcttaaacaaaacggcaaaaactttcagtaagagacaaaaacctgcaaaatgccacaagcgccttttgttaatgcagctttttagggacgttttttttattttttttaccaacttcatcaaaaatattctgattgccagactgggcttgtccatccttatttatgaaatcggggtgaatgagttttttcagatccctgactgttaaaggcttggcgtcatcagttaattctattcctaattgcccgtttgcctctaatgtcgcaattttgacatcttgtatagccgtaacgccgtgaagccttagctgcatttcaagctggtcagctgtaagtctcatcttctttaagttttcgatatgaagctgtccgttttcaatgacgatttttgcttttccggttaacatcttttcaatggtgttcgatttcatttggatccattccataacgatgagtgtgcttgtgaaaattgccgctgcaattaatgttttgaagaggctgtactcgatgattggctgaacgataatagttccgatcgaaatcatgacaaccgtttgagttgacgtcatttgtgcgattgatttccttcctgaaattctcagcaaaatgaccccggctacaatgagaacaagagattcccaagtgaaattcatgctaccacctgaccaatgatgaattagatttgtcatgggattggcttttcttccggccaatcgcaatttaatatatccgaaaggcagtcggttcattctgtcctgaaccgaacaatatttttggtatagatggatatattaagccaaacaatgatagcaacaggagttttttggccgaaacaatctgggaagcggggagcgccataacatgattgaacttgaagttgtcattagaacggttgccagctttggcttgctgttaatcgcagaacgaattttaggcaaacagacaatctctcaaatgacgatttttgattttattgcggcgatcacactaggggctattgctgccggattagcttacaatacttcaataaaatcgcacaatatggccatttcgtttagtatttttgtgctaaccatttttctaatttcgtttctgtcgataaagaacaggaagctgaggaaattttttgccggagatccaacagtgctgattcaaaacgggaagatacttgaatcaaatatgaggaaaatgcgttacacacttgattatttaaatcagcaattacgggaaaaagaaatatttaatatcgaagaagttctttttgccattcttgaaacgaatggtcagctgactgtgttaagaaaaccgcaattccggcatgtgaccaaacaggatttaatgattgcggtaaaccaagaacaaaggcttccgatagaacttattatggacggagaaatcattgagaataatttaaagcagaatcgtttgacggaatcctggcttttggaagaattgcgaaaaagagacataaaggtgaaagagaccgtgtacgcagtgctgctgggtaatggggatatttatgtggatcaatataaagaccatatatcagtccctatggataaggaatgaaggaacaatcaatcttaaagctccttattgaacgcaatggtttcaacttgtcttgggtacgaaatatgcagaagcccgtttaacagctgaatctgtaacaaatgagtttcagcggcttcgggaagctgaatgattcgctcaatttctccgtaataccgttcacgcagcacttccatttcggctggaaaaacaggcgtgatcgttcctttgatcagcagctgggttttagacagtaaacggatcgttaattcttcctcatacacaccgggcatttccacaatgataaaattatattcctcatcttgataaaagtcgtaaacaaacgtagaagcttcggaatcaaaaaaatgttccggggctttatatttgagcacatttgtccaaaagtcactttgtttatattcattcgtaatctcaagccactttcgaattttttcgaaatccatatgagattctccttaaatttgatttgaaatcggcgcagaagggtttccgatttggtcttggtcactaacgtctgaatcaatatttccagtgttcaaaagtgaagacgtaggcgaaagatcccctaaggaaaagtttgctccaaaatatttgctgttcgcagtatggctgttgtgcacagtcggaccgacatctatatttccgttttgcgtgacgccgttgatcttaatatttgcgatattaatttgatatggcatagacgaaacccctttaatctaaaattggcggtggtgcaatcggaggagcattaacgttggatgtatcagagttgccgatagatgtctggtcatttacatcaggatcgtttaagaagttttccattacggattctgtaggtgatgtatcaccgaaagaagagttggtcccttgagatttttgattgttggtagggctgttataagcagcttcgcctattgtaattgaaccattgcccgaaatactgttgatcttcaaataatataggttgattactgtagacggcatcccatcacacccttccatctttctgtacagtacattatgcgccgctgcacccaattgttccttgcatttacgggcaaaactctatctggccctggagtgatgctcgttagaaaaaaagaataaagtttgtcacagcctgaatgtcaatctatttggcaaatacttatcagtgaatgaaaagccattgatataggaagcaatgaattgattcagttattcgaaatgcatgagaccctttaataaagaaagctggcaaacaggatcagtttgaaattattgacaatgaagcaaatgccatgaaataatactcgtgagtaacattacttgcgagtattatttttgggggtggtcctcgttgaaaagtaaaaaaggacgtaaaggggaagaaagccggaaacggttactcaaagctgccgctaatgaattttcgattcggggattccatgacgcgaaggtaagtgaaattgtgaaaaaagctgggttcacgcagccttcattttacctgtactttcaaagcaaagaagccatctttgccgagttaataaccgattttcactctcgggtcaaaaagctgacagagtcacttcttctggaaaacggattaaacacggaggatgtgtcaaaacgggtactgctagctgtagagactgtttttcagtttttggctgaggacaaggatttaaccaagatcggcttttttctcaacccggaagcaaaacaaatgaaaaaagacttggcgatggttttgaaagagaacttagaagcagaacagcggcttggctattttcactctgaactggatatggaaactgtcgctgagtgtttggtcggcatgattgaacatttaaccgattcatttttgttaaccggaatcaaagatccggcaagcctcgcagcagaggttgtgaatcttttgatatacgggatgcttccgaaagggaatgacgtaagatgatatctattattctgaaagtcagtttggcagtttttatgcttgcgggaggcatcataaaggtaagccgcgttccctttcaagttgagcattggcggcattatcaatatccattatggtttctgactgttactggcattcttgaaatagccggggcacttgctatgacagcgggaatttggaatcggtatgcagcgattggagcaggtgttctgtttgtcgttctcatggcgggagccattcatgcgcatatgtttcgagcaagacaatcggtcatcatggcgataccagcgatgatttgtttgattgtttctatcatgatcatcatggggagttacacgtaagcttttcactaatgtttaagaacaagcccatttgcaggaaacctcctgttcttatcgaataatagaaagtccaggaattaactgaagcagtaaaatagagatccatttctgcgttattcgtccggcatcagctgggctttttttataaaggaggaatacaggatggcattaactttggaagacatgactgaggaagagttcgaagcctttcgcgggatgtccgtgcaaaattttgcgaaacaaaacataacttcaggaacttggacggaaaaagaggcatttgagaaatcggagcagacatatgagaacatgattccgaatgggcgagacagcaacaatcattatttttggaacatcacaaatgaccaaggggaaagaatgggctggctctggctgtacgctgatccgtttcatccgcaaaaggaagcgtttatctattcctttggattgtatgaagcctttcgcggaaaaggacttgctcaattggcgcttcaaacgcttgatgaaagagcaagagagcttggtgcggaaaggctggctctacatgtatttgcacacaacgagacagccgtctatctttatcagaagatgggctatgccttgaccaatatacgtatgcggaaacagctatgctgaaaagtcgcttacgttacccaaacacaagatgcctatctggaagcagtggcagggtactataagtcatcattagaaacattaaggtcatgggaaggcttgaacatataaagaaaaaaggacaacagctgttgtccttttcaatgccgcttgaactttctccctcagtcttttttgtcttgatgatccagctcttttattcgtttcgtaagctcattgaaagcctgatcaagctccttataccctttatcatttggcgtcataaaactgagctttcccagcacttcttgtctttctgtctcaagctttaaccgaagctcctcccgctcatttctttctgaaggagcgtcgtttaactgcttttcgatgccgttgtttgagatgacgagtttactgtttgttgttttttcgagaaagtatcggtcatgtgaaaccgccagcaatgtgccgctgtattgtgacagtgtttcttccagctgttcgcgtgacggcaggtcgagatggtttgtcggctcatctaaaatcagcacgtctttttcctccagaatatatgccatcagcttgatctttacacgctcacccatactcatatgcttgatcggttcagtccattggtcggctgtaaaacctaagtgcctcatcagattttgaacgtgcccccttgctttgaatgtttcattctcaaataactcttccggtgtttgttctaaaggcaaatcaaacacctcctgcgttaaatagccgatgtttgcggacggcgacacccatacgcttccttctgctgtttcctgtccaagaatgatattcagcaatgtcgtttttccgctgccattggggcctatgatcgcaaccttttcgccgtgctgaattgtaaagtttgcgtttttaaagagagtcctttctccaaacgcttttgttacattctgaacttctaaaaaccgtttccctgttttgtgggttgtatcgattgaaaagcggactgtatattctggggtaacgggttccgcctttgctttttcaagctctttttcaagccgcttctgcttggattttatctgggcatccgtacgcttcgcttttacccggtgatattctttaaacccttcctttttcgtcgattgagcatgggctttttccgaccaagaagcgagctcattcatttgtgcttcaatccgttcaaccattttttgctgcttttcatattcacgctgctgggtgagtcttttcttctcccggaacttcatatacccggagtaattccctttgaattcaatcagcgtctgatcctcaagcgaccatatttttgttgcggcttcgtctaaaaaatatcgatcgtgagaaacgagaatcacagtgccgttataatgtttcagctgttggatgagaaattgcaagcttttttcatcaaggtggtttgtcggttcatctaacagcagcagatctgcatcctctgatagtcctttcgccagccgcgcttttagtttttcaccgccgcttaactgatgaaaatcacgaagaggcacatgccatttctccagtaacttcttttcggcaggtgtctgatccgcaaaggaatatgccgctgtttcctgttcaaccaaagccagttttatatcctttcgaaggatttgaccctgggaaggggctaagtcattgtgaatgaggtgcagcagcgtagatttcccagcgccgtttttgccgataatcccaatgatatctccttgctgaacactggcatttatatttttaaaaacagtcagatccttcacttcatagctaacgtttgttaatgttacgatctctttcatccatatccctcgctttaaagggagaataaaaaaatcctcccaaatgtgttggaaggattagccgtgcctgtgcatgatcaaataagctattttttataaatagcaggtcgtatatatagaaaatgggcagactaatcctattttttgatttgaaatattgatttcaaacgataaaaataagattagttaatcattgtccacccatcatcccttcttgttttgattacaaacactatagcataccttcaaattcaaaagcaaaggtcattttcatcaaaaaaactcctgctctcatttttgaggcaggagtttcgagtgttattgatgcttcgcttttctcactttataaatcacaatcagcaaaataaaccaaaccggtgtgacaaataaggaaacacgagtatcctgtgccagtgccagcacaaccagaacaaacgccaggaacgcaagaatcaggtaatttgtaaacggataaagcggaagcttaaacttgtttgttttcgctaattcaggtcttgttttgcggtatttcatatggcagatgaccgtaattccccaaatgtagataaagcatacggttgaaatacttgtgatcagggtgaatacgccttctggcatgatgtagtttaacgtaacaccgattaaaatcacgatagctgaaaagaataaagcatttcttggcactttacgctgagtcagtttcgccattgactcaggcgcattgtgatctttcgccagggaatagaccatacggcttgtactgaatacagcgctgttgcatgctgaagcagcggaagtcaatacaacaaagttgataatacttgcagccccgacgatgccaaccgcgacaaatacttgtacgaatgggctttcgctgggattgatgacatcccaaggatagatgctcataatcacgagaagagccccgatataaaaaagcaacacacggacaggaatattgttgatcgccttagggattactttttcaggattttctgtttcaccggctgtaagcccgacaagctcaatgccgacaaaagcaaacacaaccatctggaacgagaggataaacccgtgcatgccattcgggaacaggcctccgtggctccagagatttgtgaagctggacactcctgagcttgtggaaaagcctttgaaaatcatcacaaggccaatgacgattaacgccaaaatggcaatgactttaatcaaagcaaaccaaaattctaattctccaaaaagcttgactgtcgccaggttcataatcagtaaaataattagagcgattaagccaggcacccattgcggcacacccgggagccaatattgagtgtagagcccgactgctgtcagatcagccatcgcaatggaaatccagcagaaccaatatgtccagccggtgataaatgctgccatatcgcctaggtagtcttgtacaaaatccacaaaagagtgatagttcaagtttgataacagcagttcacccagcgatctcataattaaaaagcaaatgatccctgtgatcatataagcaaataaaatcgaaggtccggcaaaatgaatcgatttgcccgagccgagaaataagcctgtcccaatggctccgccgatggcgatgagctggatatgcctgtttttcaagcctctctgcaacgtttgctgatttatattgtctttcgtcatgtcgtctgtcactttatgtgttcctccattgaaaattgtttattgagtcagcaatctatttttaatgattattataacactaaaatttctatcttttttactaaaaaaggattgatgaaaagaattttaatgtgatttggactatttcccgaaaaaagcggctccatttagggagccgcttttttatgctttttcagtttttgtcataaacaggtagagcccgtaatctgtcggtgcggatgcgtagcctgcctgccgcagcattgctgtgatattgccacggtggtatgtcccgtggttgacaacgtggggaagcagttcggaaacagttgttttcatgattccgcttgagggattctgaatctggagtggcttattgagctgttctttttgctgtaaaaatagtatatagcgctcggataacctcagaaaaaggtcttccatttcctctatttctttagcctctgtctgttctttaagctgttcagctaaagccaacgcatcgctcaaggttttgccggaaaacacttcaatccagccgagatcagaaagataaacatgagacaatacatgggatattgacggaaacacgctttgaatttcttgatggtatacctcttttggaagctcttttaatcggttgaatatttgttgattggcccagacgttatattcatacaatttgaatgcaaaatctgacatgttaaaattccccctttcgtgtgtatagcttccattatacacgaacatgagttcttatgtagagtgctcaaaaataaaatttgttgacatatatagtttagaggaataaactaattgacattgaacataaagtttagcggggtaaactataatgaggaggggaagatattgaatgaacaaaagctatgtcaggcgataaacctgtttgtggaagtcctgcttgaagggacagaatttgtacatcgtgaaatcaatcaggatgtcttcaagcatatctcaagggaacaggcagacctgttgaaaattttaaaagtcaagggcccaacctctcccggcagcctggccatgtaccaaaatgtacataagagcgcgatctctaacagactgaaaaagctgctcgaaaagggattggttcaatgggacgactgtctggaaaaaagtgataggcgctctaagcttattaacattacacccagtggtgaacacatactagaagaattagattctgccatctttaacgcgctcaaaccgctgattgatgatatagatgaggaacacttacattccatcatcgagatattcaccattttaaaaagcaaatttaaaggaggagattctgccgaatgagagcaatcatcaaattcaagtgggcaattgcagccatagtattagcacttaccgtcgttttgagtttgttttctccgaacttaacggagctggccaatcaaaaggggcaggcccagcttcccgctgatgctgtttcagaaagggcaaacgccattttaaaacaagcgggagaagacaataattcgatcagtgttgtctttacattagacaacgctataaagaaagaaacagagaatcagctccggataatgattgataaaatcaaaaagatcgacggtgtagaagaggtaacatctcctctgtcagcggaaaaagaagtcaaagaccagttgatgtcgaaagacaagaaaaccgttctcatgcctatcacgattacaggttctgataaaaaggcggaaaaaattgcggacgagatttatcaaatcgttcctgatgacttgacggcatatattacgggagcttcccttatcaaccaggatttcgctcacagctcagaggaagggcttaagaaaacggaagtgatcacagtctgcctgatcatcggtttactgttgatcgtgttccgatctgttgtgacgccttttatcccgattgtggttgtcggtttttcttatctgatcagtcaatccatactgggcatccttgtatacaatgttgattttcctatctcgacgtttacgcaaaccttcttagtcgcgatcttgttcggcattggaacagattactgcatactgcttcttacacgattccgtgaagaattggcaaacgggcatgataaaaaagaagcggcgcttatcgcttaccgtacagggggaaaaaccttatttatcagcggttttgcggtattgatcggattttccgccttaggatttgcgaagtttgcgattttccaatccgcagtaggggtagcagtcggtgtgggaattttaatgattatcctctacacactgctgccattatttatggtgacgctgggtgaaaaattattctggccttctaagaaagtgctgtcacacagtgataacaaactatgggcgtttctcggcagacactccgttgcgcgtccgtttctgttcattgtcatcacggtggtgattacgcttccgttcatcttgacctatgatgaccagatttcattcgactcaactgcggaaatcagcagcgattataaatctataaaagctctcgaggccattaaggatggattcggggaaggaaaagcgttcccgatcaatgttgtcgtaaaaggagacaaagatcttacaacagctgatacaatcccctatctaggaaatatcagcaaagcgatcgagaaagttgatcatgttgactctgtgatgaccattacgcagccgactggtaaaaaaatcaaagatttatatattgataaccagctaggatcggtttcagacgggctggataagacggtaaaagggattgccgatgtccaaagcggattaacggatatagaaaacggactgaatcaaatggcagggcaaaccggctcggcctcaaatggagggtctggcggttcactgggcgatgcggcagatggcttgggcaaaatcaatcagcagctgcagctcgtgagcaaacagatttcccaaaccggcaataccgcacagaccgtgcagcagcttacggcaatcagcggacagcttggccagattcaaaccggtcttgaacaagcgaaccagcagctctcaggccagcaggcacaagccggaacgctgacagaaagcctgaagaagctgtccgaaggcgtgaaaagagcaaatcagggcctgacgaaagtctctgacggtattacagcttccagtgatatgttagaggatatgagcaaaagttcaactgtaagagatacaggcatattcattcctggtcaagtaatgaaggacaaagactttaagaagtcaattgaccagtattcctttgcagacggcaaaggtgttcaattaagtgtcgttctggattcaaatccgtactcagaacaagctattacgacaataaaccaaatcaaaaaagctgtcgcaaacgaagttgacggcactcctttggaggatgcacagatcgtatacggcggggtcacgagtatgaatgcggacttaaaggagctgtccacaacggacttctccagaacaatggtgattatgattataggcctgtttatcgtgttaaccattttgttccgctcaatgatcatgccgatttatatgatcgcgtcattgctgctgacgtactatacgtcgatatccataacagaattaatttttgtaaacggcttaggaaacgcgggtgtcagctgggcagtgccattcttcagctttgtcatcttgatcgcgttaggggtagattattcgatcttcttgctggatcgatttaaggaagaggtgcaccttggcattgagcaaggtgtcgtcaggtcaatgagcaaaatgggatctgtcattattacagctgccattatattggccggtacgttcgcggcgatgatgccttcaggtgttaatacactgatgcaggtggcaagtgttatcatcatcgggctcttgctttacggccttgtcattcttccgcttttcatcccggcaatcattgcgacctttggagaaggaaactggtggccgttcggcaggaagaaaggaaaagagtaatcgagagaagagtgatgaatggtcatcactcttttttcatgatctaaacgacgaacttcagacgtgttacccaaaaaaggtcagacgatcaaacggcggctgggtacttaaaaacaaagagcccggaaaacattcccgggctctttgttttatttccattctgcaattgtatcaatcggcagacggtaggaagcatagccttcgtctgctgcttttccgatagaaagtagcataaccggtacataacgttctttatctaatccgaaggtttccgcgatgttttctttatcgtatccgccgatcgggtttgtatcgtagccatgcgcgcgtgcagtcagcatcagctgcatggaaacaagacctccatcaatcaggatcgtttcacggttgacctgtgccggaagcttttcaaaatgtgcggtcagcgcggcgatttgtctgtctttgacctcctgcggcatgtaaccaagttccacggcttttgaatagatttcttctaagtagtctgcattgttcatgtctgcaaatacagcgatgacagcagatgatgttgtgacctgtgtttggttaaagcttgcaagcggtgcgagcttttcttttccttccgggctgtcaatgacaagaaaacgccatggctgcgcgttaacagaagatggggcagttgttgcttcctctaagatctctgtcatttcttctttgctgatttttactgccggatcatagttgcggatagaacggcggcctttcataatttccataaaatcgtttgttttgatcatgttgatacactcctcttaagcttcgatattatttatattgtttcgcatgcgcgccagcacatcaatgagcaggcggcgttcttctgcgcttacatttgcgagcatttccttcatgaaacgctccttttccttcttagaagactcaattcgctctcttccttggtctgttaaccgaacaagggtgatgcggttgtcctcaggcttgcgccgccttgataccatgcctttggcttccagctgtttcaggtgtctggtaacggctgcgctatcgatatttactttcttttgaaggtcgctttgactgatctcatctgcatgataaagcaatgtcagcaattccaaacgagattggctgatgcccgtgcatgcctcgaacttcacgccaatcaccttgttcacgccttgcagctgatataaaatctcggcttcctctgaacaaaatgacgccaaaacccatcccttctttcctgtcaaaactattaattgatatatcaatgattgacacgtcaattaatatacaacgattgatttcatcttgcaagccatttgcacttttgaacaacctcccagcgcataaaattcgctaggctagaacttagcaaaaaaagctggccgcttcttcagatgatgctggtcacgatgattccctgcatcattcccatttataggtgttcggaatatcactttgccgagcccgtgctcaagcggctttcacaggctgaaagttatgatacaatatacaaatgtttcacagcttcaatccatagttggagctgacatccattatataagggactaggttgaagggaaggtttgataacatgctgcacaatccaactggaaaagaacgcttggcactagcgtttctgctcggcatgcttgctatattgggcccgcttaatatagatatgtatttgccaagttttcctgaaatcgcgaaagatttatcagcaagtgcttcacttgttcagttaagtttaacagcctgtctggtcgggcttacgatcggccagctgattgtcgggccggtcagcgatgcgcagggaagacgaaaaccgctattaatctgtatttttttatttgcgttatcttctctgttttgtgcactgtcgcccaatataacaactttagtggctgcgcgttttttacaaggcttcactgcttctgcagggcttgtgctgtctcgcgcaatcgtccgcgatgtgtttaccggaagagagctttctaaatttttctcgctgttaatggtcattaccgcggtggcgccaatggttgcgcctatgacaggcggtgccattttgcttttgccgttcgcaacgtggcatacaatttttcacgtcttaatgatcatcggatttttactagttcttctgattgcattgaggttaaaagaaacgcttccgctggaaaaacggattccaagctcaatcggaacatccgtcaaaacgatgggcagcctgctgaaggatcgatcctttatggggtacgcgttaactgtcggatttattcacgggggaagctttgcatatgtgtctggtacgccttttgtataccaggatatctacggggtgtctccgcaggtatttagtattctttttggcattaacgggttggcgattatatcgggcagctttatcatcggacgctttggcggaatcattcatgaaaaaagcctgcttcgtatagcggtcattacggctatgattgcgacggctgtgctattaaccatgaccatgattcacggtcctcttgctacattagtcatatccattttcatttacatgattacgatcggcatggttctgaccagcacgtttaccctagccatggaaaagcaggggcaccgcgccggaagtgcaagtgcgctgcttggaatgcttccgctgctcctcggttcaatcgtgtcaccgcttgtaggcattaatgagacaacagccgttccgatgggagccatcatgtttgtgacagctgtcatcggctcactggcgttttttggattaacgaaagaacgagtagggcagaattcataaaaaaacctgacatgacgtcaggttttttgttttatttagaataacaacagcaggcctgcaatcgccggagtcaaaaagatggctgatttcaaaaccacctttggcatgaggttggtgaatttcgcgcctacataggccccgcacattgtcccgaccagaactttgacaagtaaaacgtaatcaacaaaaccttctgtaatatatccgatgcctccacctacagccagagggatgatcacaagcatcgtcgttccgacagaatggcgaatggacagattcagcataatcattaaaccgatttgaataaaaggtgccgacccgatgccgaatgtgccggaaagaacgccggctgcaattcctaagatgaccgctctcgtatacgttgaaagagtgctttgattcacttgagccttctcttttaaaataaataatctgattaaaatgagaattgctgataaaaataacattccagccgtcaaataatgaagcaaatcagccggaataaaagaagtcagcttggcgccgaaaaatgagccaaccgcagcaaagcctccgactattaagccgattttcatttgaatgttaccctcgcgatagtggctgtatgcccctgataagcttgtaaaagccatgccggcaagcgaagtgcctaaagccgtatgaatcgggatatggaaaagaagcgttaaaagggcaatgacaaagccggctccaccggcgccaataaagcctaaaataattcctagaagaaacataacaagaataatgagcatattttttcctccattgaaaagatgtaaaaaatgtaatcgtgcgctattctggcggaggtatggtgtcctattgacgaagaaaaacacgccgttttttcagttgccagtagtccgtcgaccgtcgttcagcaaacatatcgtacctcaaattctgggatctgacaaggcagtttgttgcttcccattaccatctgttatatgattttgatgaagaaaagcccttgaatatattcaaaagaggtattatatatggacgattttaaattagataagccgactccctactacctgcaattttataaccagctaaaaaaaatgatcttcaacgggacttttaagcctggggaacggataaacgaaacacagctggcgaaaagctttggcgtcagccgctctccgataagggaagccatgcgattgcttgagaaagatggtttgttaaaagcggatgaccgaaatgggttttcgatcacgtcgttaacggcaaaagatgtagatgagatttataaaatcagaattccgctggagcagctggcagtcgaattagtcatagacgaagcggacgaagaagagctgaccatactcgaaaaacagcttgaagaaacagagaaagccattcacaacggcacggaagatacggaaatcattcgtttaaaccaaaaatttcatgagctgctggttgatttcagccataacagacatttgaaaaatttgcttgagcatgtaaatgacctgattcatttttgcagaatccttaattataccggcgaccaccgtgcagaaacgatactgcgtgagcaccgcaggatatttgaagaagtgaaaaagaaaaacaaagaagcagccaaacagcatgtgctggctcatttcaatcatgactgtgagcatttgaagcatgtgcttgaagaaggtaaagagaattgatttgtatgatccggtaccaagggagagcagaacccttggtatttttttatgtattcaccacatatctaagaggccccgttaataagattttatgatggtttgactaacgaataatgggggttaaacatgtttatccatatcgtcgggcctggtgattctttgttttcgataggcagaagatacggtgcttctgttgatcaaatacggggtgtgaatggtttagatgaaacgaatatcgtgccggggcaggctctgcttatccctctttatgtatatacagtccagccgagagatacgcttaccgccattgcagctaaagcgtttgtgccattagagcgactgcgagcggccaatccgggcatcagcccaaatgctttacaagcgggagcaaaaataacgattccttcgatctcaaattacattgcggggacattgagtttttatgtgctccggaatcctgacctcgatcgggagctgatcaatgattatgcgccatactcgtcttcgatttcgattttcgaataccatattgcatcgaacggcgacattgcaaaccaattgaatgatgcggctgctattgagacaacttggcaaagacgggtcacgccgctggcaacaataacgaaccttacatcaggaggcttcagtacggagattgttcaccaagtgctaaacaatccgacagcgagaaccaatctggtcaacaacatttatgacttagtttccacaaggggatatggcggtgtcacaatcgattttgagcaggtgagcgccgcggatcgcgatcttttcactgggtttttacgccagctgagagatcgccttcaggcgggagggtatgtgctgacgatagctgttccggcaaaaacaagcgataatattccctggctgagaggctacgattacggggggataggagcggttgtcaattatatgtttatcatggcttatgattggcatcatgccggaagtgagccgggtccagtagcgccgattactgaaataaggagaaccattgagtttacgattgcgcaggtgccgagcagaaaaatcattatcggagtcccgctctacgggtacgactggatcatcccgtaccagccgggcacagttgcttcagcgatttcaaatcaaaacgcaatcgaaagagcgatgaggtaccaagctccgatacaatattcagccgaatatcaatcaccgtttttccggtacagtgatcagcaggggcggacgcatgaggtatggtttgaggatgtcagaagcatgagccggaagatgcagatcgtccgcgaatacagattgcaggctattggcgcttggcagttaacgctgggctttacaccgggcccatggcttctgcggaaattttttacgatcagaaaagtgtaaaaaaagacaccacaactggggtgtcttttttttgattaagtccagagcagcagaatagttcattcatttgtaccttgcataggttgtgttcccattttacgattagtagtagtctgatcaaacaaagagtcagaatacgatttgagagggagttgtctacatgaagacagtattgattttgaattttcctgcggaaggccatgtgaatcctaccttaggcattacaaaagcgttttccgataagggatatgatgtccattatatatccactgaaaaatataaaaaacgattagaagcagcgggagcaacggtccatcttcaccgggatctgctgcgaacaacacctattcatgtcggttcgcccaatggcattcttgatttcgtgaaaatccatatcaaaacgtcattggacattttacagattgtcaaagacttatctaagagcattcaatttgattttgtttattatgataaattcggcgcgggggaattggtaagggattacttagatattccaggagtctcttcatcggcgtctttcttgtttggcgaggagcacctgaaaatcctgccgctgcatccggagtctggagcgccgcttgaattggatcaagagtgtgaagatcttttggcaaaaatgaaagaaacgtacggtgttgccccgaaaaacctggttcaattcatgaacaataaaggggaattgaacgtagtgtatacaagccgttattttcagccagaaagtgatcgtttcggggatgaatgtctgtttatcgggccaagctttccaaagagagcggaaaaaacagatttcccgattgaacagctaaaagatgagagtgtcatttatatttcaatggggactgtactggatcatacagaggatttcttcaacctttgtattgatgcattttcaggctttaacggaaaagtcgtcatcgctgccggagaaaaagcggacctgaccaaattaaagcaggcgccggaaaactttatcattgctccgtatgtccctcagctggaagtgctggagcaatcggatgttttcattacacacggcggaatgaacagcgtaaacgaaggcattcatttcagcgtgccactggttgtcatgcctcatgacaaggatcagccgatggtggcgcagcgtctctctgaactccatgcaggctatgtcatctctaaagatgaagtcaatgcccaaatattaaaacaggccgtagatgaggttttgcgcaaccatcagtatacggcaggcattaaaaaaatcaatcaaagcttcaaggaatgtatggacatggaagaagtgatggagcgggttgatgagttgattcgccaaaaaaacaaataagaaaaagaactcccgtaccttgtacgggagttcttgatttaaaacttgattttgattttttgagcatcactgattttcttatggttatggtcaaagacgtcacttgtcgtgatttcgatccacttgatctcttttgttttcttctcagcatccgcggccttatcatgagcatggcggcttgatgcgttcacaataaagccgagatttccagacttttcggcgccgccttccaattcgccgtttaactcttcaagataaatatctttgttccaatcaaaggtttcgcccgtatttgttttcatcaatgcaatcggcgcaacatttactttttttgaagaggtgttcttgatatcaacgaaaaccttaacgaaatcaaactcttcatcgtgtgttaactcatgaaagtaatcaatcatgctgtagtccgggcgcaagtggatcagcttcatttcttttactgttaactccacgtcgccaatcttataggttttgttcacttgtttgatatcttttaagacagcttttcctttatcatctgaaaacgtttggccgaccttaagcaatgaccggtcatcagttacctgggaattaggctgataattatctgtgctgtccttctgggatgaagtgctttgcggctcagcttttactgttttctccccgcctgcatgctgtttttcagtactggcgtttgatgagcagcccgcaagcatgatagcaaaaacgaaaattgaaagaattcttctcatgatgattcctccattaaaaagagatcccgttacttcatacaagcaacgggacaccttgtaatcttttacttatcgttaatcttaatgttgtattgtaaagccttgaagacatttttggcgatttctgtattgtcgatttggccggcaaatgtctcactagacggaccgtatgcatagacgggaacatcttcaccggtatgtccgcctgttgtccatccagtgtgagagcgtttattaaagatgttctcgattgcgttatcgatatccagtacttccttcgattttgccgcttcttcaacagattgaatttcggcttttgttaaagccaatttcttttgatcgatatatgttttcaaagttttttcaacatccgcgccgtcagagatcttttctgccataaagtcaggtgtgcgctttgcggctttaatgggttcactgaaccagttgtagatgccgtccgcaccgatggaatatccgccggttgagtggtcagccgttgcgacaaccaatgtgtgcttgtcttttttagcgaaatcaatagccgccttataagcttgttcgaagtcttccatctcgctcatggcaccgacgatatcattgtcatggcccgcccagtcaatctggctgccttccaccatgaggaagaatccgtctttatccttgtttaattttttaatggctgtgtttgtcatatctttaagtgatggaatatccttcgtccggtcaatctttttaggcaggccgccgtcagcgaataggccgagaacttggctgtctttatttttcagcatgtccttgcgatcatccacgtagctgtaccccgcttttttgaattccttgatcaaattacggtccttacggtcaaaattgctctttcctccgcctaaaaggacatcaattttgtgcttgccgttgaccatctcatcaaaataatcatccgcaattgagttcatattttttcggctatggtcgtgtgaaccaaaagaggccggagtggcgtgtgtaatttctgaagtggccacaagtcctgttgcttttcctttttccttcgcagcttcaagcaccgttttggcttctgacccgtcgttatcaacggctatggcattattgtatgttttaattcccgcagacatagccgttgccgccgctgcagaatccgttacattttgttcaggatcatcgggataagttgtttgctggccgacaagatactgatcaaaagccgtaggctccacaacttttgtctttttattatcctttaagtatcgataagcggacgtataagacacacccataccatcaccaatcagaacaataacattcttaatttcgtcttggtttccctttttcttttcctgggcgctggcatcaggcacactgccgctggctaagctgctgaacgcaattgatgataaaaccgcgataggcagtaatttcttcgggaattttttcaactggataacctcctaaatatagatgaatctcaatgacaacccaattatatttttaaactgttaagctagtattaatcgattttaaagattggatttacaagaataatgaactgctatcaagagaaaggaaagagtgatagtactatagaaataaattggaggaatagatactggccgtggataggcggactgaaatctgctatagtcgcatagaagcaacccgcttacatctggaacaattttaagtattatgttggaaagaggtattgtgtaagcacatgtctgagcagttcatatggagtggcatcattttattttaggagggaacaacatggacgttttttctgagtatttagcgggaattgatgacccgttccaccgagaaagaacggaagaggtgttaacttggataaaaaataaatatccaaatttacatacagaaataaaatggaaccaaccgatgtttacggatcacggtacatttattattggctttagtgtttctaaaaagcatttagctgtcgctcctgaaaaagtaacgatagcgcacgtagaggatgatattgtgaaggctggatatgattacaccgagcagctgatacgtatcccttggaatggtccagttgattacacgctacttgagaaaatgattgagtttaatattctggacaaggcggaatgctccactttttggcgaaaatgaaggaaaaaggcataacatatgagctgtataaaatatgttacgccttttcatttgtctatttttcgttttgatcatctattgctgcttttcttcaaacaaggtcatttcattgagcgtaagctggctcgcagaataatgattaccttgtttccatttcacttcaatcgtaatatcatggccttcaagctcatgttcatctaaccgctctaaaaaagaaacggacttttcctttgcgcttccatcacgataagtgcctccagcataatcatgcatcgggatttccgtgtcagaactcagcagaatttcatcatccttttttacaatcagtgattccaaataagtgttgtctgtttcatgtggttcaccgatccaataaagttcgccgctgtattcattcggtgcatcttcattttttttgaaaacagcttcccaattctggtctttgctttctccctgccaattcggatactccaaacgaacatgatgaatcaggtgataggaaaaaaagatcaagcagagagcgattaataggaatgccgtgaaaatgagagggtatttataatgactggacataaaagactcctattcgtttaatcaattaccttcgaaaatagaatttcatcccgaatcaaaatgccgttttcagccacctcgggaatctccggcttgagtcggcgcgctttttcaactgcgttcggaaacacttcggcgaattgatagcctctcttttgataaaacgccatcgcatgtacattatcattcgttgtaataagctttattcgttgacaatgtgcatatttagccgtctcttcaacctgctggagtaaagctgtgccgattcctttattttcaatcatactatctaatgaaataatttcacaatctttcccatctatcaagtatgtaatacagccaatgatttcgccgctttcatttactgcggcaaatccatctaattcatcacaccgaaaaatgccgctggaaatcgccatctcgggtgtaccccaatgcttggcaaaaaaatcggtcaacatctgtttcgctatctcattgtttgggatgatcatcatcataacactcctctattgaaagattgcatatgtactatcaatataaacaatatataacaaaaaaaatagatgttgaggtgacggcatggaaatcagcgatgtcatttacgggcaccaccatatagacggagtgctggaagagcttatcaaaagcgctcctgtgcaaagattaaaagggatctatcaaggcggagcaagctttttagtcaatcgaagatggaatgtgaccaggtatgagcactccatcggcgtaatgctcctcatcaaaaagctcggaggaacgatagaagaacagattgcaggtctgctccacgacgtatcacacacagctttttctcatgtggtcgacgttgtctttgaaaatcaagcagaagactatcatgaaaacatctttcaacaagtcattgttcactctgaaatcccggacattttacaaaaacacggctatcatactgaagaacttttatctgacgattcaaggtggacattgctcgaacagcccgcaccggagctgtgtgctgatcggacagactatacgctgcgtgatatgtaccgatatggacacattaacctgcacgaagcgcaaacctttttggatcatcttattgtgagaaacggaaggatgtttcctgatagtattgaagccgccgaatggtttgtcagtgtgtactacaaggaagtaattgatttctttttgaatcctgtgaatgtatatggatatgaatatttagcgcgagcattgaaggcagcgctgcggcatgatgtcatatctgcagaggatctgctgaaaacggaccaagaggtactgaacatcctgcgtgcatcaaaaaatgaagaagtcctgagcttgcttacatccattcatcccggcatacaagtaatagaggatgacatccagtacgatttccatcaaaagaagaaaatgcgcctaatcgatccatccatttttcttgatgacaaatggatcaaatcctcagatgtttctgaaaaggtgaggaaaatgggtgaggccgcttatcaaaaagcaaaaaaaggtgtgtatataaaaatcttaaatcagtaattgccgcctgacagcggctttttttatgtttggctttgcaaacaaaggggaataggacaaactgcgggaacgcattatgagaatatcagcgtatttacataccgttcgggggtatagtattatcgagagggcatgttttcattgtctgcgggcaaaagttacaggaaaaaaatgaagcaaaggagaatgaacatgaaaatctctaaaaatgcactgggaattctgatgttatctcttgtttttgttttatcagcatgcggcaataacaacagtacgaaagaaagcacacatgacaatcattcagactcctcaacacatgaagagatggaccattccggatcagctgacgttccagagggattacaggaatctaaaaatccgaaatacaaagtaggcagccaggtaatcatcaatacttcccatatgaaaggcatgaaaggtgctgaagctacggtaacaggtgcctatgatacaactgcgtatgttgtttcttatactccgactaatgggggacagcgtgtggatcatcacaaatgggtgatccaagaagaaatcaaagatgccggagataaaacgttacaacccggagatcaggtgattttagaggcttctcatatgaaaggcatgaaaggagcaacagccgagatcaactccgcggaaaaaacaactgtatacatggttgactatacatcgacaacaagcggcgaaaaagtgaaaaaccacaaatgggtcacagaagatgagctttcagctaaatcataaaaaatcctccttttacaaggaggatttttttgctgtctgaacaggtcttgttaaagaaatgaaagcaaacaggacagcgatgatcacaattgacccgccgcaccatgctgttgacaccacagtacccgtttgatccaaaacaacaccgccaatggctgagccaagggcaattccgacttggagggccgatgtgttaaagctttgctgaatgtcagacgaatcaggtgcaatttcaattaaatagctttgctgagccggggcgaggctccagctcagaagaccccaaatcaccatcacaggcaaaaagaaaatcatagacgatgtagacagcggcagtaagaacataatgatagcaaaggaaccggtcaccagcaaaatgctcttaaaggaaccaagccggtcagatagcgctcctccgaaagggcctccgcatacggcagatatcccgaaaaggaaataacaaatgctgacccagaaagagctcaggtgaagagtctcttctaaaaacggcgcaaagtaagcgtatagcgtgtagtggccagctaatgtaaacatcgtgacgaggtgtgaactcgcgattttcagattaccgatcgtcttgagctgttcccggaaaggaatcattttctccgccggtattctttcaaagaagattgaaataatcagcatggagatcagcgccaacaggccgatgccaaggaacaaaatccgccacccgaaggaatcgctgattaagattccgagcggcacacctaatgcgatagcagagctgaaacccataaaaataattccgattgcgcgggctctgtattcaggcgctacaattttcggggcaatcgttaaagaaagtacaacaatcagccctgtactcatcgccgccaataccctagataccatcaatgttgcgaaattagggctgaagtaggcgacaagattgctaaggaagaaaacaaataaagcaattagatataagcgcttccgctcaatcttcgcagtcaatgccaaaagcagcggcccagatactgcatatcccagcgcaaacacactgatcagctgtccggctgaaacaatggaaatgtctaaatcatttgcgatctgaggaagaattccccccacaattaactcaaccaatccgactgcaatcgtagaagctgcaagcaggaaaactttgaaattcataacaaactcctttacttaaatgttttgataaataaaaaaaatcctgattacaaaaaatgtcataaacaaattttgtaatcaggattttacggttcctggtagacaccctcaaaccatattattgaggttatacaagtgttaatagctatttaattgattcgtttccgttgatgagtgtaccacattatgaatgaatcttccatagaaaatttacaaagtaatgaaccggacaagtgtatgattatatttattttataaaagtatagacatttaaaagtgaatgactataataatcaatgtaagcgttttaattacaaggggggatagcagttgaaaaaaatattactcgcgtgcagttcaggaatgtctaccagtttattggtgacaaaaatgaaggaatacgcacagtctatcggtgaggaagcagagatttgggctgttggccaagataaggcaaaagaagacatgagaaaagcggatgccgttttgatcggtccgcaaatgagctttctgaaaagcgagctccaaaaagaagcagatcaatacaacattcaagttgaagtcattgacatgatggcctacggaatggcagatgggaaaaaagcgtatgagcaggcattgtccttaatggtgaatcaataatggaacagatgaaaatcacgaatttaacagacgagcaaatcagttttcagctaatcctgcacagcggaaatgcccgaagctgcatcatacaatcactgcgcgcctataaagaagggaacaaggacgaggctgatgccctcattgccaaggcggagcaggatttatccgcggcccatgacattcactttcaaatgatacagaaggaatccggcggagaagcaacagctttttcattgctgcttatgcatgcagaggatcatctgatgtcaacattatccatgaaagaattagtgaaagagatgcttgatctctttaaaaccaagaatatataaaaaataggggtggatagggtgttcgagaaaatcagccaattccttgttccaattgcagggaggttaaacaataaccgctatttgcaagtgttgcgtgatgcatttatgctggctttcccgctgacgatattcgggtccatttttgtcgtgttaacgaatttgccgtttctaaacaaaatcatgaacgcctcaatgcttacgtcgtttcagtctcatttcggcattgcctccacggcgacaatgggcattatgtctgtctttgttgtgttcgggataggctattacctgtcgaaaagctatcaggtcgaagctgtatttggcggagcgatcgctttggtttcctttttgctcttaacgccatttatcattcagccggaaacaggtgatgccattacaggggttatcccggtcgatcgtctcggtgcaaaagggatgtttcttgggatgattacggcatttctttctggcgaaatttacagaagaatcgttcaaaaaaacctgacaatcaaaatgccagccggcgttccgcctgctgtagcaaaatcatttgccgcacttattccggcttttatcacattgaccgtatttttgctgattaacgtaatggtgactctgttttttaaaacaaatatgcacgacgtcatttatcacgcgattcaggctccgcttgtcggacttggaagcggtatcatcccaacgctgattgccgtgtttttcattcaaattctttggtttttcggactgcatggacagatcattatcaactccgtgatggacccgatttggaatacactgcaggtagaaaacctttctgcttacacggcgggaaaagaaatccctcatattatttcaaaaccgtttatggagatttatacagtagggatgggcggaaccgggatgacgcttgcggttgtgtttaccattctcatattcatgaaaagcaggcagatgaagcaagtatcaaaacttggcctcgctcccggtatttttaacgtaaacgaaccgattatcttcgggcttccgattgtcatgaatccgatcattattgtgccttgggtgctggcaccgatggttgttacgctcgtcacctatctggctatgtcagccgggctcgttccgcctccgactggtgtgacggtgccgtggacggttccattattcattaatggcatcatggcgacgaactcaatcatggggggcgtgatgcaacttatcaatctgctgattgtcttcgtgatctggtttccattcctaaaagcaatggataaattaaatctggcaaaagaaaaagaacaggctgtgcaggaaacagctgctcagcaaaatgataacagcataaaaatgtgacataaggggagagagacttggcacaaacagaacaatatcgttttccaaaggatttttggtggggatcatcggcttcagcaacacaaacggagggtgccgccgacagagacggaaaaggccagaatatatgggattattggtttgaaaaagaaccgcatcgtttttttgatcatgtcggacccgcagacacatcccaattttacgacaactataaagaagatatcaggctgatgaaggaacttggccacaactcgttccggatgtcgatttcctggtcgcgtttaataccaaacggaacgggcgagatcaacgataaagccgcaaatttctataacaatgtcattgatgagttgatcgctaacggaattgaaccttttgtcaatttgtttcatttcgatatgccgatggcgcttcaaaaaatcggcggctgggtcaacagagagacggttgacgcgtatgaaaactatgcaagaacttgcttccgtttgtttggcggcagagtgaaaaaatggttcacgcataatgaaccaatcgttcctgtagaaggcggatacctatatgattttcattatccaaacaaggtcgattttaaagaggccgtccaggttggatttcatacgatgctgtcaagtgcccgtgccattcaggcttacagggagatgaagcaggacggaaaaatcggcatcatcttaaatttgaccccttcatacccgagaagcagccatccggcggatgtgaaagccggggaaatcgcagacgcgttttttaacagatcttttttagatccatctgtcaaaggcgaatttcccaaagagctggttgacattttgaagcatgaaggctttatgcctgattacattcctgaagatcttgacatcatcaaaaagaacacggttgacctgttgggagtgaattattaccagccgagacgtgtgaaagcgaaagaacatcttccgaatcccgacgctccttttttgcctgacaggtattttgatccctacgtcatgccgggccgcaaaatgaatccgcatcgcggctgggagatctatgaaaaaggcgtttatgatattttgatcaatttaaaagaaaactacggaaacatcgagtgttttatctctgaaaacggcatgggggttgaaggtgaagagcgcttcagagatgaacaaggcatcattcatgatgattaccggattgaatttataaaagagcacctcaaatggattcaccgcgccatacaggaaggctcgaacgtaaaaggctatcacttatggacgttcatggacaactggtcttggacaaatgcctataaaaaccgctatgggtttgtatcagtcaatcttgagaaagacggagaaagaaccgtcaaaaagagcggaaaatggttcaaaacagttgctgagcatagcggtttctagattttcctaaaggtcaagatcttccggcaatcatcataacgaatagagatgacgaaaatccgcaacattgatgaaatagggaaaagaacttatgatatccgtaaaagcttatgtgatatcagactctaacagctgccggaggatgccaatgaataaatacgaaattattgcaaatgaaatgagaaatagaattaaaaataacgtatatccgatcgatcagcccattcctgatgaagtatctcttgcaaaagaatttaactcaagccgcatgacgatgaagagagccttggataatttagttgctgagggtctgctgttcagaaaacgaggccatggcacgtttattattcaatctgcaatacaggatgaccatgtacatgtagtcagcaatgagattctcggattgaccaacttgctgaaagataaaaaaatccaaagcaaggtcattcagtttgaagtgcaatttcccactgaggaagtggccgcccatttgtctattgatcaaaaaacaccggtttattatgtcgttcggcttcgaattgtagaaggtgaaccctatgtattagaaaaaacatatatgccgactcatttaataccgggcattaatgacgatgtacttcatgattcgatctacaatcatattacaaatgtgctgcagctcaaaatcgccggaacgcatcggaaaatcagagcctgcaaatctgatcatattgaccagcagcatctgggctgtaaacaggatgatccaattctggaagtggaacatgtgggcttcttagataccgggattccatttgaatattccttttcacgtcatcggcatgacaagtttgttgtgacttctgtaaacatacggcgctgattgcggagacaacaaggaggccatctgcatgcttggcggtattgaagcaggcggcacaaagtttgtttgtgctgtcggtagagaagatggaacgatcattgacaggatagaattctccacaaagatgccggatgaaacgatagagaaagtgattcaatattttcgccaattttcattacaggcaatcggcatcggctcctttggtcccgttgataacgataaaaccagtcaaacatacggtactattacggccacgccgaaagcgggctggagacactatccctttttgcaaaccgttaagaacgaaatgaagatcccagtcggatttagtacagatgtcaacgctgcggcgctgggtgaattccttttcggtgaagcgaagggtcttgacagctgcctgtatataacgattggcactggcatcggagcgggggctattgtagaggggaggctccttcaggggctgtcacacccagagatgggccatatttatatccggaggcacccggatgacgtataccaagggaagtgcccttatcatggagattgctttgaaggcttagcttcaggccccgctatcgaagcccgctggggaaaaaaagccgcggatttatcagatatagcccaagtctgggaactggaagggtactatattgcccaagcgctggctcagtatattttgatccttgcacctaaaaaaatcattcttggcggcggcgtcatgcaacagaaacaagtgttttcttatatctatcaatatgtaccaaaaatcatgaacagttacttggatttttctgaattatcagatgatataagtgattatattgtacctccacgtttaggcagtaacgccggaatcatcggcacgctagttttagcgcatcaggccttacaagcagaggtagcatccggggaggtgcgatcatgacgcatcctttatttttagagcctgtctttaaagaaagactatggggagggacgaagcttcgtgacgcttttggctacgcaataccctcacaaaaaacaggtgagtgctgggccgtttctgcacatgcccatggcccgtcggctgtaaaaaatggcccgctggcaggaaaaacactagatcaagtatggcaagatcatccagagatattcgggtttccggatggtaaggtgtttccgctgctggtaaagctgctggacgccaatatggatctctccgtgcaagtccatcctgatgatgattatgcaaaactgcacgaaaatggcgaccttggtaaaacggagtgttggtatatcattgattgcaaagatgacgccgaactaattttgggacatcatgcaagcacaaaggaagagttcaaacaacgaatagaaagcggtgattggaacgggctgctgaggcgaatcaaaatcaagcccggagatttcttttatgtgccaagcggtacactccatgctttatgtgagggaacccttgtccttgaaatccagcaaaattctgatacaacgtatcgcgtatacgattatgaccgctgtaatgaccagggccaaaaaagaactcttcatatagaaaaagccatggaagtcataacgataccgcatatcgataaagtgcatacaccggaagtaaaagaagttggtaacgctgagatcattgtttatgtgcaatcagattatttctcagtgtacaaatggaagattagcggccgagctgcttttccttcatatcaaacctatttgctggggagtgttctgagcggatcaggacgaatcataaataatggtattcagtatgaatgcaatgcaggctcacactttgtcttgcctgcgcattttggcgagttttcaatagaaggaacatgtgaattcatggtatctcatccttaatgaatgggggagttgcatttgtttaagaaacatacgatctctttgctcattatatttttacttgcgtctgctgttttagcaaaaccaattgaagcgcatactgtgtcgcctgtgaatcctaatgcccagcagacaacaaaaacagtgatgaactggcttgcgcacctgccgaaccgaacggaaaacagagtcctttccggagcgttcggaggttacagtcatgacacattttctatggctgaggctgatagaatccgaagcgccaccgggcaatcgcctgctatttatggctgcgattatgccagaggatggcttgaaacagcaaatattgaagattcaatagatgtaagctgcaacagcgatttaatgtcgtattggaaaaatggtggaatccctcaaatcagcttgcacctggcgaatcctgcttttcagtcagggcattttaaaacaccgattacaaacgatcagtataaaaaaatactagattcttcaacagcagaagggaagcggctgaatgccatgctcagcaaaattgctgacggacttcaagagctggagaaccaaggtgtgcctgttttgttcaggccgctgcatgaaatgaacggtgaatggttttggtggggacttacatcatataaccaaaaggataatgaaagaatctctctatataaacagctctacaagaaaatctatcattatatgaccgacacaagaggacttgatcatttgctttgggtttactctcccgacgccaaccgagattttaaaactgatttttacccgggcgcgtcttacgtggatattgtcggattagatgcgtattttcaagatgcctactcgatcaatggatatgatcagctaacagcgcttaataaaccatttgcttttacagaagtcggcccgcaaacagcaaacggcagcttcgattacagcctatttatcaatgcaataaaacaaagatatcctaaaaccatttactttctggcatggaatgatgaatggagcccagctgtaaacaagggggcttcagctttatatcatgacagctggacactcaataagggagaaatatggaatggcgattctttaacgccaatcgttgagtgaatccgtaatgtcacaattaagaaggtgctcaagaagtttcttgagcaccttcccactggattaagcattcatatcgcctaacccaggactgtgttcatttggtatttcaggaagcactggtacgggaaaccctgccggaggatctattacttgtaactctccgccatttcggcttggagatttcccttgatagatttcactgattctcgtttcatccaacctaaagttaaactgtgcattatgatagcctaattcgacatactttctgcactcaggatatttattaatgtcataattcggtacagggagcagcttcgcccattcaacgcccaatgtctcgagcgctttcgcgaatgcattctggtgagcattgtcgcgtacaatcagaaaagcaagtgtttcgcggaacgtctgattagagctcatttcataaattcttgttttttgcagcacacctgtcgactcaagaagcaggttatccagcaggtcagtaattaagtttccgtggttatacacccacgacccgttccacggattgccccctgcatcaacaggaagggaactttgcgctccaataatataatgatgaggattagcatgtttaaccgcttcatcaagtggcgcttgatctgcaccttgactgccgacaccttcaccgcctgattcatctaataaagcattgattgtgttttgaaccagttcaacgtgggcaatctcctctaaaaaaatgccgcgaagcagatcgcggtactgtttctgctttcctctgaaattagagctttggaaaaaaaactgcatcattgtacgcatttctccgtaatgaccgcctaatatctcctgcaggaccttagcagctgccgggtctggcttgtccggtttaatgatattaatcagttcctctttgtagtaatacataacacgcctcatttcttcttaagagattttcttatattatttgtaagatgagataaaatatatacatgataagcatgggaagacgtgaaagaagaaaataaaaaaatacatgaaaagtgttgaccaaatgaaacaagcatggtatattattaaacgtcgctgatgaacagcgtgaaacaaaacgaaaaacaaaaaagtttttctaaggtgtttacaagattttaaaaatgtgtataataagaaaagtcgaattgaaaaagattcgaaaaaacattttaaaaaaacttcttgacttcaccatcaaatgatagtatgatagttaagtcgcttgataagcgcccgtagctcaattggatagagcgtttgactacggatcaaaaggttaggggttcgactcctctcgggcgcgccatttaagataccacgcgggtgtagtttagtggtaaaacctcagccttccaagctgatgtcgtgagttcgattctcatcacccgctccattattgaatgatctttgaaaactaaacaagacaaaacgtacctgttaattcagtttttaaaaaatcgcacagcgatgtgcgtagtcagtcaaactactttatcggagagtttgatcctggctcaggacgaacgctggcggcgtgcctaatacatgcaagtcgagcggacagatgggagcttgctccctgatgttagcggcggacgggtgagtaacacgtgggtaacctgcctgtaagactgggataactccgggaaaccggggctaataccggatggttgtttgaaccgcatggttcaaacataaaaggtggcttcggctaccacttacagatggacccgcggcgcattagctagttggtgaggtaacggctcaccaaggcgacgatgcgtagccgacctgagagggtgatcggccacactgggactgagacacggcccagactcctacgggaggcagcagtagggaatcttccgcaatggacgaaagtctgacggagcaacgccgcgtgagtgatgaaggttttcggatcgtaaagctctgttgttagggaagaacaagtaccgttcgaatagggcggtaccttgacggtacctaaccagaaagccacggctaactacgtgccagcagccgcggtaatacgtaggtggcaagcgttgtccggaattattgggcgtaaagggctcgcaggcggtttcttaagtctgatgtgaaagcccccggctcaaccggggagggtcattggaaactggggaacttgagtgcagaagaggagagtggaattccacgtgtagcggtgaaatgcgtagagatgtggaggaacaccagtggcgaaggcgactctctggtctgtaactgacgctgaggagcgaaagcgtggggagcgaacaggattagataccctggtagtccacgccgtaaacgatgagtgctaagtgttagggggtttccgccccttagtgctgcagctaacgcattaagcactccgcctggggagtacggtcgcaagactgaaactcaaaggaattgacgggggcccgcacaagcggtggagcatgtggtttaattcgaagcaacgcgaagaaccttaccaggtcttgacatcctctgacaatcctagagataggacgtccccttcgggggcagagtgacaggtggtgcatggttgtcgtcagctcgtgtcgtgagatgttgggttaagtcccgcaacgagcgcaacccttgatcttagttgccagcattcagttgggcactctaaggtgactgccggtgacaaaccggaggaaggtggggatgacgtcaaatcatcatgccccttatgacctgggctacacacgtgctacaatggacagaacaaagggcagcgaaaccgcgaggttaagccaatcccacaaatctgttctcagttcggatcgcagtctgcaactcgactgcgtgaagctggaatcgctagtaatcgcggatcagcatgccgcggtgaatacgttcccgggccttgtacacaccgcccgtcacaccacgagagtttgtaacacccgaagtcggtgaggtaaccttttaggagccagccgccgaaggtgggacagatgattggggtgaagtcgtaacaaggtagccgtatcggaaggtgcggctggatcacctcctttctaaggatattatacggaatataagaccttgggtcttataaacagaacgttccctgtcttgtttagttttgaaggatcattccttcgaaacgtgttctttgaaaactagataacagtagacatcacattcaattagtaatacaagatatcacaagtgattctttttaacggttaagttagaaagggcgcacggtggatgccttggcactaggagccgatgaaggacgggacgaacaccgatatgcttcggggagctgtaagcaagctttgatccggagatttccgaatggggaaacccaccactcgtaatggagtggtatccatatctgaattcataggatatgagaaggcagacccggggaactgaaacatctaagtacccggaggaagagaaagcaaatgcgattccctgagtagcggcgagcgaaacgggattagcccaaaccaagaggcttgcctcttggggttgtaggacactctatacggagttacaaaagaacgaggtagatgaagaggtctggaaaggcccgccataggaggtaacagccctgtagtcaaaacttcgttctctcctgagtggatcctgagtacggcggaacacgtgaaattccgtcggaatccgggaggaccatctcccaaggctaaatactccctagtgaccgatagtgaaccagtaccgtgagggaaaggtgaaaagcaccccggaaggggagtgaaagagatcctgaaaccgtgtgcctacaagtagtcagagcccgttaacgggtgatggcgtgccttttgtagaatgaaccggcgagttacgatcccgtgcaaggttaagcagaagatgcggagccgcagcgaaagcgagtctgaatagggcgcatgagtacgtggtcgtagacccgaaaccaggtgatctacccatgtccagggtgaagttcaggtaacactgaatggaggcccgaacccacgcacgttgaaaagtgcggggatgaggtgtgggtaggggtgaaatgccaatcgaacctggagatagctggttctctccgaaatagctttagggctagcctcaaggtaagagtcttggaggtagagcactgattggactaggggcccctaccgggttaccgaattcagtcaaactccgaatgccaatgacttatccttgggagtcagactgcgagtgataagatccgtagtcgaaagggaaacagcccagaccgccagctaaggtcccaaagtatacgttaagtggaaaaggatgtggagttgcttagacaaccaggatgttggcttagaagcagccaccatttaaagagtgcgtaatagctcactggtcgagtgactctgcgccgaaaatgtaccggggctaaacgtatcaccgaagctgcggactgttcttcgaacagtggtaggagagcgttctaagggctgtgaagccagaccggaaggactggtggagcgcttagaagtgagaatgccggtatgagtagcgaaagaggggtgagaatcccctccaccgaatgcctaaggtttcctgaggaaggctcgtccgctcagggttagtcgggacctaagccgaggccgaaaggcgtaggcgatggacaacaggttgatattcctgtaccacctcctcaccatttgagcaatggggggacgcaggaggatagggtaagcgcggtattggatatccgcgtccaagcagttaggctgggaaataggcaaatccgtttcccataaggctgagctgtgatggcgagcgaaatatagtagcgaagttcctgattccacactgccaagaaaagcctctagcgaggtgagaggtgcccgtaccgcaaaccgacacaggtaggcgaggagagaatcctaaggtgatcgagagaactctcgttaaggaactcggcaaaatgaccccgtaacttcgggagaaggggtgctctgttagggtgcaagcccgagagagccgcagtgaataggcccaggcgactgtttagcaaaaacacaggtctctgcgaagccgtaaggcgaagtataggggctgacgcctgcccggtgctggaaggttaagaggagcgcttagcgtaagcgaaggtgcgaattgaagccccagtaaacggcggccgtaactataacggtcctaaggtagcgaaattccttgtcgggtaagttccgacccgcacgaaaggcgcaacgatctgggcactgtctcaacgagagactcggtgaaattatagtacctgtgaagatgcaggttacccgcgacaggacggaaagaccccgtggagctttactgcagcctgatattgaatgttggtacagcttgtacaggataggtaggagccttggaaaccggagcgccagcttcggtggaggcatcggtgggatactaccctggctgtattgaccttctaacccgccgcccttatcgggcggggagacagtgtcaggtgggcagtttgactggggcggtcgcctcctaaaaggtaacggaggcgcccaaaggttccctcagaatggttggaaatcattcgcagagtgtaaaggcacaagggagcttgactgcgagacctacaagtcgagcagggacgaaagtcgggcttagtgatccggtggttccgcatggaagggccatcgctcaacggataaaagctaccccggggataacaggcttatctcccccaagagtccacatcgacggggaggtttggcacctcgatgtcggctcatcgcatcctggggctgtagtcggtcccaagggttgggctgttcgcccattaaagcggtacgcgagctgggttcagaacgtcgtgagacagttcggtccctatccgtcgcgggcgcaggaaatttgagaggagctgtccttagtacgagaggaccgggatggacgcaccgctggtgtaccagttgttctgccaagggcatcgctgggtagctatgtgcggacgggataagtgctgaaagcatctaagcatgaagcccccctcaagatgagatttcccattccgcaaggaagtaagatccctgaaagatgatcaggttgataggtctgaggtggaagtgtggcgacacatggagctgacagatactaatcgatcgaggacttaaccatatttttgaatgatgttacatctgttatctagttttgagagaacactctcaatttgtttggtggcgatagcgaagaggtcacacccgttcccataccgaacacggaagttaagctcttcagcgccgatggtagtcgggggtttccccctgtgagagtaggacgccgccaagcattacttttatcatcgcggggtggagcagttcggtagctcgtcgggctcataacccgaaggtcgcaggttcaaatcctgcccccgcaaccaaatatatgattaaataaggagtgccctaagggtacaactaaaataatcttatacaaatatggtccggtagttcagttggttagaatgcctgcctgtcacgcaggaggtcgcgggttcgagtcccgtccggaccgccattaatgtaaacgaaacgatcatgttttcgttttttttgtgttttcttttactgtatcttctgcttggtgtcatagccaagctttctttatatcgggaacatcttggatattccagcaaaattcgataaactaggaagagcacatataggcataagcagggttgaaaggagattttggttcatggatgaatttgatttgatacatagcattactccgcggaccattcaccattcttccgttgatgtaggaataggtgatgatgcagcgctctacactgcgaaacacggcgttcaggaaattgtttgtgttgatactatggtagaagacgtgcacttcaaattacactattcctcacctgaagatatcgggtataaggcgttagccgttaatataagtgatattgccgcgatgggaggcattccgaaattttatttggtatcacttgcggtaccttcaaaatggacggcatccgaaatcaaggcgatgtatgaaggaatgaatgaactggcgaaactatatcagatggatctgattggcggcgatacagtttctaccgctgacaaattagtcgttacagtcactgtgatcggtgaaattgaaaagggacaggcctgtttgcgcagcttggcaaaaccggatgatattgtgtttgtaaccggtgaaatcggttcttctgcagcagggctttctttattgctggaagagactaatcctcaaaactcatctgtggaaacggattactttatccataggcataaacggcctgagccaagagtaagcgtcggcagattatgctcgtgttttaaacgggcagctttaaatgatgttagtgacggattggctagtgaactgaacgagattgcagaagccagctgtgtttcaattgaaattgatgaaagcatgcttccaattcattctgatttacctaagcttcatcctaactggaaagaatgggctttgtttggcggtgaggattttgagctgacagggacggtttcaaaagaggagtgggaagtgttgaagcagcagtgcgcagcacgtcaacttcccattacaaagattggccatgtcagggaaaaaacaaaatctaaagtgatcctaaaaacagatcaaacatcaatgatcttagagaaaaagggatataatcattttaaataagacgggtgactcgtgtgaagcaattaaaatggagaactgtaaatccagaagaaacaaaagcaattgccaagcttgcggcagcgtttgctaaaccgggagacgtcctgacattagagggcgatttaggtgcaggaaaaacgacttttacgaaaggttttgcagaagggctgggaattacacgtgttgtaaacagtccgacttttacaattataaaagaatataacgatggcgtacttcctctttatcacatggatgtgtatagaatggaagatgaaagtgaagatttgggacttgatgaatattttcacggacaaggtgtctgtctcgttgaatgggctcatttaattgaagaacagctgccgcaggagcgactgcaaattgtcatcaaaagagctggtgatgatgagcgggaaattacctttactgctgtcgggaatcggtatgaaatgctttgtgaggagttaagtagacatgacaatattagcaattgatacatcaaattatacattgggcattgcgctgcttcgagaagacactgttatagcagagtacattacatatttgaaaaagaaccactctgtaagagcgatgcctgctgttcattcattgctgaatgattgtgatatggcaccgcaggacctttctaaaattgttgttgcaaaaggccctggttcttacacaggagtaagaataggtgtgacgttggccaaaacacttgcctggtctttagacattccaataagtgctgtatcaagtcttgagacgcttgcggcaaatggtcggcattttgacggtctgatcagcccaatctttgatgctagacggggacaggtgtacacaggtctgtatcaatataaaaatgggcttttagagcaagttgttccagatcaaaatgtgatgctggcagattggctggagatgctaaaagaaaaggaccgccctgttttgtttttaggccatgatacttctcttcacaagcagatgatcgaggatgtgcttggaacaaaagggttcattggaactgccgcccagcataacccgcgtccttcagaattggcttttctcgggaaggaaaaggaagcagctgatgttcatgggcttgtcccggattacttgcggctggcagaagctgaagcgaaatggattgaaagtcaaaagtagggtgataggatgaaaacaaaagcagcggtcagaaatatgcggcttgaagatatagatcaagtatacgaaatcgaagcatcctcctttacgtctccttggacgaaggattcgttttatcatgagctgctggaaaatccatatgctcattatctcgtgattgaaaaggacggccatcttgctgggtattgcgggatttggattgtgatggacgatgcccaaattacaaatatagcgataaaaccagagtatcgcggccagtctttaggagaaacgctttttcgctcagctgttgaactgtgcaaagaaaaagacgcaaggcggctttcgcttgaagtgagggtttcgaatcatcctgctcaaggcttatataagaaattcgggatgcagcccggcggaataagaaagaactattatactgataacggggaagatgcgttaattatgtgggtgacgataaatgagtgagcaaaaagacatgtacgtattaggaattgaaacaagctgtgatgagactgctgcagctattgtgaaaaacgggaaagagatcatttcaaacgtagtagcctctcaaattgaaagccataagcgcttcggaggcgttgttccggaaattgcttcaagacatcatgttgaacaaatcactttggttatagaagaggcgtttcgcaaagctggcatgacgtatagtgatattgatgcgattgcagtaacagaaggtccgggactggtgggagcgcttcttatcggagtgaatgccgctaaagcattgagctttgcacataacattccgttagtaggcgttcatcatatagccggtcatatatacgcgaaccgtcttgtagaagacatcgtgttcccggcactggcattggtcgtttcaggaggccatacagaactggtttatatgaaggaacatggatcatttgaagtcattggggaaacccttgatgatgcggcaggagaagcctacgacaaagtggcgcggacgatgggattgccatatccgggtggaccgcaaattgacaagctagctgaaaaagggaatgacaatattccgcttcctcgcgcatggcttgaagaaggctcttacaacttcagctttagcggattgaagtctgcggtgatcaatacgcttcataatgcatcccaaaaagggcaagagattgctccggaagatttgtctgccagtttccaaaatagtgtgatcgatgtcttggtaaccaaaacggcgcgcgcggcaaaggaatatgatgtcaaacaggtacttttagccggaggagtagctgcaaacagaggcctcagagctgcattagaaaaggaatttgcccagcatgaagggattacgcttgtcattcctccattagctttatgcacggataatgctgcgatgattgctgctgctggtacaattgcttttgaaaaaggaattcgcggtgcatatgatatgaatggccagcccggccttgaattgacttcttatcaaagtctcacgagataatagcgtgagactttttatctgtttgttattaacagataattcacaatttatccacatgtctgtgagtaattatagagatatagatggataaagggctgaagtcactgttaataaagtggataaattcagaatattttgtggatattgtgtataaagcgcttactttgttttgcttattagggtatgttctgtggataaaaagcacctctaaaaagaggtgcttgacttttttaatcttcttctgtggatagttcttcccattcggacaaaagagattccagctcctgattaagcttctcattgtctgcatggatagcttgtactttttcatgatcctgatagacttcagggtcacatagcaattcatcattgcggctgatgttctcttcaatggtttgaacagtggtttcaatttcttcaatccgacggagtcgttggcgctctttctttttccattctttttcttcctcgtaggaacgtttggagtcagacttcacagtagctggcgttttttcagtttcttcttgctgatttattttctccaattcaaactgctctgtttttttctcagtataataatcgtaatctcccagatactcctctatatggcttgaagaaagctccaatactcttgtggcgattctgttaataaaatatctgtcatgtgagacaaataacagtgtgcctggataatcaatcagcgcgttttcgagaacttctttgctgtctaaatccagatggttcgtcggttcatcaaggatgagaaagttggctttttgaagcatcagcttagctagagccaatcttgctttttcgcctccgctcagtgaatgaactggtttcagcacatcatctccggagaataagaaatttccgagacacgttctgatttctttttctgggagcccggggtactcgtcccacagctcatcaaggacacgtttagaggaagtcagctcagcctgttcctgatcataatagccgacactgacatttgagccgtatgagatcgttccttgatctggttttagggtgtctatcaatgttttcagtaatgtcgatttaccaattccgttagggccgacaagcgctgcgctttctcctcttgtgagcatgaatgacacttctgttaaaagcggcggctggttttcatagctgattgtgagatcctgaacacgaaggacttcatttccgctctgttttgtaatatcaaaatgaaagtttgcggatttttcatcgccaagcggttttgacatgacttccattcgctcaagctgctttctgcggctttgcgcccttttggtggtagaggctctcgccaggtttcggtctacgaagtcctgcagctttgtaatctcgccctgctgcttttcatacattttaagatctttttcatactgcgcggctttttggtcgagataagcgctgtagttgccgtgatactttttgctttctgctcttgatacctcgtatacctggtttactactttgtccaaaaagtagcggtcatgcgaaacgatgagaatggcgcctgaatagccttgcaaataatgctcaagccaggtaagcgtatcaatatccagatggtttgtcggctcatcgagaatgagcaaatcaggctgtgttaacagaagcttacctaaagccagtcttgttttctggcctccgctgaggctttgaacctgtgtagaatcgtcaaaatggctgaagccgagaccatgcagcacagatctaacatccgcttcatattgatagccgcctttatctttgaattcctgctgaaggcggtcgtaggttttcatgatgctttctaattcaccggggtcagctgccgccattttttcttccatagcccgcatttccttttccattgcttttaagtggtcaaaaacagtcagcagctcttcttttatggtaagcttagaatccaagccagtatgctgagcgagatatcccattgtaatatctttcggtttaataatttcgcccttttcatacgaaagctggcctgcgataattttaaggagcgtagattttccggcgccatttcttccaacaatggcgatgcgatcacgatttctgacttccagctttatattgtttaaaatagtatcagcaccaaacgatttggacagctgattaacttgtaagatcatcatattatttcacctctgctataataagttaagtgtagcttatgaaccagaagtcagcaaacaatacattggccatataagacatagagaagaaaatagtgtatgatctgtttaaggagcgttttaatatgaatggattttctcattttaatgaacagggcagagcccagatggtggatatcagcgaaaaatcttcgactgtccgtactgcggcggctgtttcaagcgtacacatgaagaatgaagtgtacgagaaaatacagagtcacgatatcggcaaaggagatgtactggctgtcgcacaggtggcaggcattatggccgcaaagcaaacgtcgaatatcattccgatgtgccatccgctttcattgagcgggatagatatatcgtttgactggaaaataaaagaagcagaagttatacttcatataaaagcacaggtcaaaacaaaagggagtacaggtgtggaaatggaagcgctcacttctgcatcggtgtgcgctcttaccgtttacgatatgtgcaaggctcttgataaggggatggtcatcggccctactttcttgctggagaagacaggcgggaaaaacggtgactttaaaagagaactatccgagtataatttggaggaccaaaaatgaataaggatcaatcaaaaattccgcaggcgacggcgaaacggctgccgctttactatcgctttttaaagaatctgcatgcgtcaggaaaacagcgtgtatcatccgctgaactcagtgatgccgtaaaggttgattctgccacgattcggagggatttttcctattttggagctcttggcaaaaaaggatacggatataatgtggattatttgctgtcttttttccgaaaaacgcttgatcaggatgagatgacagacgtcatcttgattggtgtcgggaacttgggaacggcatttcttcactataatttcacaaaaaataataacacaaaaatttctatggcttttgatataaatgagagtaaaataggaactgaggtaggcggcgtgcccgtctataaccttgatgaccttgaacaacacgtaaaagatgaatcagttgccattcttacagtgccagcagttgccgctcaatccattacagacagattggtcgcattaggaatcaagggaatccttaattttacgccggcccgtttgaatgtgccggaacacattcgaattcatcatatagatttagcagttgagcttcagtcactggtttattttttgaagcattattcagttttagaggaaatcgaatagagggaaaggaggagcccaaatatgccgatcggtcctggaagccttgctgttatcgcaatcgttgctctgattatcttcggtcccaaaaagctgcctgaattggggaaagcagcgggagacacacttcgtgaattcaaaaacgctactaaaggattaacgagtgatgaagaggaaaaaaagaaagaagatcagtaagttaggatgacacgaatgaaagtgaatcaaatgtcgctgctggagcatattgctgagcttcgaaaacggttgctgattgtagcgctggcgtttgtcgttttctttatagctggattttttttagcgaagccgattattgtgtatctgcaagaaacagatgaagcgaagcagcttacgcttaacgcgtttaacctgacagacccgctttatgtgtttatgcagtttgcgtttatcatcggcatagtcctgacctcgccggttattctttatcagctttgggcttttgtgagcccgggtctctatgagaaagagcgcaaagtaacgctcagctacattccgatctctattttgctgtttttagcgggcttatctttttcatattatattttatttccttttgttgttgattttatgaagcggatctctcaggacttgaatgtcaatcaggtgatcggaattaatgaatattttcattttcttctgcagctgacgattccgtttggactgctgttccaaatgccggtcatcctcatgtttttgaccaggctcggaattgtgacaccgatgttcttggcgaaaatcagaaagtatgcgtattttacgctcctggtgatcgcagccctgattacaccgcctgagcttctgtcccatatgatggtcacagtcccgcttttgattttatatgaaatcagtattctgatatcgaaggccgcctatcggaaagcgcagaaaagcagtgcagccgatcaggacgtgtcttcggggcaataataaaaaatccatttctcatgagagaaatggattttctttatttttggttctttttgattttaaatgaaaaggcgaacatcttaaaagaaatgctgatgttgtaagcggcgaacaccatcagcaggatggagtaaaatgaccacatgctgcctggcgagcttgcggcaagataagtaaagatgcaccctacggcaaagtagatcattccccaaactaccgggtttctcataaaaataatcctccaataatcaattgcatttgtgtgctctgctgttcaaggtaattccgaacaggctcaagctgcatgatgacgacgaatgtattcatcattaaatgggcgaaaatcggcacccatatccgttttgttctcgcatataaaaaggcaaaggtaaagcccattgctgtatatagaagaagatgcttcaaatcagcgtgaacaataccgaagataaccgagctgatcagtcctgcaaaaaagaaattcgttttttcgtacagcgcgccgaaaatgatttttctgaagatgatttcttctaatataggcccgacgatggaagaaacgataatcatgagcgggactgcctgaatgacatccagaatcgcttgtgtattttctgattctcttccgatgccaaaaacataatattcaatagagcctgctattccttgagagaaaagggcaatgaaaaaaccggctatcgcccaaaggatagaaagtccgattgagtccttctgtccgtttcgcagcgtttctttcggaacggttctcagaatgagcagaacaacaacgagacaggcgataaagctgataacggaccataatccttgtgcatgcagcatattttcatctgtaggctgtcctccggcataaccgaatttaaataacaagggaatcgcgattaatgcggaaaactgcatgatgatatatgtcaaaataataaaccaatactgttttctcaaatggtatgtactcctttgttaagtgggtttcgttcatctacagctattgtaacataatcggtacgggggtgaaaaagctaacggaaaagcgagcggaaaagaatgatgtaagcgtgaaaaaatttttatcttatcacttgaaattggaagggagattctttattataagaattgtgttagcactctttagtgctgagtgctaaaattacatattcatactattgaggaggttattacattgttaaagccattaggtgatcgcgttgtcattgaactcgtagaatctgaagaaaaaactgccagcggaattgtgttgccggattctgcaaaagaaaaaccgcaagaaggcaaaatcgtggcagctggttcaggtcgcgtgttagaaagcggagagcgcgttgctttagaagtaaaagagggcgaccgcattatcttctcaaaatacgcaggtactgaagtgaaatacgaaggtactgaatacttaatcttacgtgaaagcgacattttagctgttattggctaattcttaaataaacaatatttaaaacatttgaggaggtcttgtaaacatggcaaaagaaattaagtttagtgaagaagctcgccgcgcaatgcttcgcggtgtcgatgcacttgctgatgctgttaaagtaactttaggaccaaaaggacgcaacgtggttctagagaaaaaattcggttctccgttaatcacaaatgacggtgtaacaatcgctaaagaaatcgagctagaagacgcgtttgaaaacatgggtgctaagcttgttgctgaagtagccagcaaaacaaacgacgttgccggtgacggtacaacaactgcaacagttcttgcgcaagcaatgatccgtgaaggccttaaaaacgtaacagcaggcgctaaccctgtaggcgtgcgtaaagggatggaacaagctgtagcggttgcgatcgaaaacttaaaagaaatttctaagccaatcgaaggcaaagagtctatcgctcaggttgctgcgatctctgctgctgatgaggaagtcggaagccttatcgctgaagcaatggagcgcgtaggaaacgacggcgttatcacaatcgaagagtctaaaggcttcacaactgagcttgaagttgttgaaggtatgcaattcgaccgcggatatgcgtctccttacatggtaactgactctgataagatggaagcggttcttgacaatccttacatcttaatcacagacaaaaaaatcacaaacattcaagaaatccttcctgtgcttgagcaggttgttcagcaaggcaaaccattgcttctgatcgctgaggatgttgaaggcgaagcacttgcaacacttgttgtgaacaaacttcgcggcacattcaacgcagttgctgttaaagctcctggcttcggtgaccgccgtaaagcaatgcttgaagacatcgctgtccttactggcggagaagtcatcacagaagatcttggccttgacctgaaatctactcaaatcgctcaattgggacgcgcttctaaagttgtcgttactaaagaaaacacaacaatcgttgaaggcgctggcgaaacagacaaaatttctgcccgcgtgactcaaatccgcgctcaagtggaagaaacaacttctgaattcgacagagaaaaattacaagagcgtcttgctaaacttgctggcggcgtagctgtcatcaaagtcggcgctgcgactgaaactgagctgaaagagcgtaaacttcgcatcgaagacgccctgaactcaactcgcgcagctgttgaagaaggcatcgtatccggtggtggtacagcgcttgtaaacgtatataataaagtcgctgcagttgaagctgaaggcgatgctcaaacaggtatcaacatcgtgcttcgcgcgcttgaagagccaatccgtcaaatcgcacacaatgctggtcttgaaggatctgtcatcgttgaacgcctcaaaaacgaagaaatcggcgtaggcttcaacgctgcaactggcgaatgggtaaacatgatcgaaaaaggtatcgttgacccaacgaaagttacacgctcagctcttcaaaacgctgcgtctgtagctgcaatgttcttaacaactgaagccgttgtcgctgacaagccagaagaaaacgctggcggcggaatgcctgatatgggcggcatgggcggtatgggtggtatgatgtaataccgacaaaaaacccttgatttacaaggggttgtcggcaacggacgtcatttttgatgccctttataacttttcgaggcttctcatgagttcactgaacttgtgagaagcttctttttttctgtctttcgtagtttgattttttcagcactgttctatatcgattttcaatagttttgataatcccgatatgaactattcaattgaccaaaatacaaaattctaccggctcagattcctgtttacgtcttctttgataaacggcttactgtaacttcagtaaactgcatttctgttatgattataaaaagggtttaaaaatttttcgtccaaacctctgttacttctctccctattgcagacaggagatggtatcctctcatacagacaaaaaagccccagttttctaaataaatagtgtcaccaacactcttagaagtttccctaaggagtacattgccaaagagaaatcctattaaaatgtctatttgtgctgctttttagctactaagacgatgtatgttaaagatatagaacggcagaataatctgattctcaaaaattcactgtcggtgtagttaggttcttccaccaacatcttgataatattcatcccgactctatggagaccgacattccaattattaaatctaatattagttttttatgattaccaaggaggacttaatagtgcatttttcagaaatgatagatcgcttggctttatatgatttacacagaaaaagaagcaaagataaacatttttctgctgctattgcagccgatatcgatgatagagaggaattttacagtgcgaatatagctgatgtttcaattgatttgaatgaatctaaaaaaaagtatagggttggaacatttcgttatgaatccttaattcaaactgggaatcctgttaatgatactttaaaaggggaggtttttttacataaaaatgatatagatcaacccaatgttatctttgtacacggctggcgcatggaatcgtacaataggatcaaaagaatatttcataagcgtataatgaatgatttaggctggaacatgtattattattctcttccataccattttgaaagagaaccggaaaattcactgtatagtggcgagttgatgattagtgcgaatattgatcgtacaattgagtcgacaagacaggccattgtagatttacgggcattaattcactggataaaagcaaataaaaaaggccctgttatcatagtgggggtaagtttagggggatggatcactaatctaattgctaccctagaatctcaaattgatgtagtggtatcaatcttttatgccaatcgcctttcttattcaatatggaacacgatcccaggtaaattcataagagaagaattagaacaaaatggtgtgacctatgaagatttaacaaaatattggaatatcacagatcctagtcaagccttgccgaaagttaataaagataacattctgctgatttctgctaaacatgatcagtatattgacttaaaagatgcagattatttatgggaaagttgggagaaaccgaaaagatatgtctataattgcggtcattccggcattgttctttgtcgcaaaaagctggcaaatgatacgatttcctttataagagaaaggataaatacgggaaaacctggttcagtacatttgtagaccttaataagaaacaaaaggccaactgcaacttcagttggccttttctatttataataaagaaactgggtgagattgctgtcagaactactatgcgtactagtcgttttctttaatcaccattgccagttcttccacctcaccccgaatcccaatcgcaggctcccacgaatcaatcaaacgaatcgctctctgattagcttccatcgctttcgttttctctcctttacggttcaacagctgcgccatcccgtaaaaataatagatcaactcaacctgattggcgttatgtttgtcatagagcatttgctcaaaggcttcttccgctttctcaaattgaccacatttcacgtaagcgacacccagattgaaataggcttctatcgttttttcgccgccgtacgtggagctgatttcatttgccgcttcgtataattgaatggcttcttcatgatgacctctcgcaaagcttaagtcaccgcgaaccaaaagaactctgtgttgaatggtaggagaaattggttgatcttcgatttcgtttaaaatggtctctgctttttcctgttgcccgtcttttaaaaacagccttgctttgagtgcatgtccccaaacctttagatcataggcatcgtgagcatctgattgttcaagaatcttcagcccggcttctatttgctgtaaggccctgtctaaatcattgacttccatcagagcccagcctgctgtgtcgattcggaagtacgcttctcgtgtgtgttggcctaagtgatgggcggcgtcggccgctttgcgtccgtattcgattcgcaggggcaggttgattctgcttagaaaatggctaatgcgggtgatgagttcgattaggatttctttttgttcagtttcacttgcccattggatgacctttaagatgtttggccattcttttttcatttgatctaagttccgtcccagcaggtagctccaatagatagagttgggctgttcccgctttaaatgggtttcggcataatcaacataatagtgcgcccagcgattgcgggcttctttttcatattcgtgctgttcggacaagtgctgttctccgtaagcgacaacggtttggtgcgctaagtattgtgtccttccttcgcttcgttccggctgaatcagagcgtatgaccgcatttgttccatagcgtaatgaaaacggcgggcgtctaatccggctgctgccgccaggcttttttcatcaggcggcttgctgaaaaagcaaagcgtctgccagagctttcgtgtatcttcattgcatctgtcccaggtgcggccaaagaggaattcaaacaattccagcagtgagtagcctgcttttccaagctcatgaatcaactgctgcgcggggatgtcatcgtctgacatataggcgatgctgagtgccatggctttcgggtttccagcagtcgctgaaatgaattcgtttttcagatcagatgatagatgtaacagctgctccagcttttcccgcttatgtgggaggttgcatgtttgtaagcagcggtgcacttcttgctggaaaaatttcaaggcatctgtttggttaaggccgctcagctgaatagctgtcatttctccgaagctttcccgataagtttgctttacgttttcccgcgctgtgaggagaactttcacgccttgcggaaggctggtgataaattcatgaatgtcacgttctgcagtatcaatgctgtcaacgatcagcaggatcggtttttctctagtgtaattagctaacgcattgcggacgacgaatcgtttttcattgattgatttatcgatttgttctgtacgtccgagctgataggcgatcgtatttaaaaaatcgctaaagctcaatcctttccaatcagcgctgacccaaatgatactgttgaacgccggccaatctgaagtatcgtcgacacaggaataggctgcttcaagagcgattgtggttttacccataccagcccagccggtgattaaacagactggtgacggagaaagcatccattgccgtatcgcttccatatcaaagctgcgtccgataaagcgtccggaccagcgtgagggtaaattatgagtgataggctgttctgtaagcgcattcgtttcatggccgggtctgtcatgaaacagccgttttactacattttcaatttcgtcttcactcggagccccgaataatccgtcttttcgcagtattttcgcttttttcaaacaggatgctgcccatacaggcaatgcgggtttgatgactgggatagtggtggcttccagcaagtcggtcaaccactcgatatccaagtcggtcttttcgagaatgatccagatcattccgaacagttttccgtcgtcgattcttccgggaatgtagtttgctcccatctgtccgatccagcttttgatcgtgtttggggagactcccagctggagtgcgattttatctatgtaagactgtcctgttttttcattctttttccttctgattttataatcaggatgaagttttagcgttttgacgccaggtgccagcagttgtgcaaattgttttcggttttcaagttcagccataagcctgcacctcctattagtactattttatcaatccagcgttttttgtatatgaaaaaataaaagtacagtgccgctgtccttttatacagcaggaaaggctgttgaacgtgttgaaaagcagataaaatgggggcagtaacagagaaaacaaaaatgtatgcacttacattttattttctaaagaaaggaacttgccaaatgactcacacagtacctcaaaacatgaaagcggctgttatgcacaacacaagagagatcaaaattgaaacattgcctgtgcctgatatcaatcatgatgaagtgttgattaaggtgatggctgtcggaatttgcggatctgatctgcattactatacaaatggccgaataggcaactatgttgtggaaaaaccatttatccttgggcatgaatgtgcgggtgaaattgccgctgtcggatcatctgtcgatcaattcaaggtgggagaccgcgtcgctgtagagccgggtgttacgtgcggacgctgtgaagcgtgcaaagaagggcgctataatctttgcccggatgtacagtttttggctacaccgccggtagacggcgcgtttgtccaatatattaaaatgcgtcaggactttgttttctctatcccagactcactttcttatgaagatgctgctttgatcgagccgttttctgtcggcatccatgcggcggccagaacgaagctacagcccggatcaacgattgcgattatggggatgggccctgttgggttaatggctgttgccgcagctaaagcatttggggcaggcacaatcattgtcaccgacttagagccgctgcggttagaagctgcgaaaaaaatgggagcgactcatattattaatatacgtgaacaggatgcacttgaagagattaaaacgatcacgaatgatagaggcgttgatgttgcttgggaaacagcagggaatccagcggcattgcaatccgcactggcttctgtgcgccggggcggaaaattggcgattgtcggtttgccttcacagaacgagattccgctcaacgtgccgtttattgcggataatgagattgatatttacgggatcttccgttatgccaatacgtatccaaagggaatcgaatttctcgcttccggcattgtggacacgaagcatctagtaacggaccaatattctctggagcagacacaagaggcgatggaacgggcgcttcaatttaagaatgaatgtttaaaagtgatggtgtatccaaatcgctgagtgaacagggaggatcttcgtattctccctcttgtttactggaaatgaaaacggattcttggggtgggaaatgatgattgaaacagaaaaagtaacggcaatgaaagtgaagcatcagtcaaaatccagtaccggactgtcctggtttgaacgaatcggttatggattcggtgatatgtcgtataatattatctttcagtttgtaaacgcatacttattattttattatacagacgtcggcggcattcagcctgcggtgatcgcaactttgtttcttgttgtgcgtgtgctggatgctatttttgacccgatcatgggattgattttagataaaacgaatacaaggtggggaaaagcaaggccatatttgctgtgggtggcatttccttttgcgctattcacattcttatgtttcacgacgtctcatttcggtgagaccggaaatatggtatatgcgtatgtcacttatattctgcttgggatgtcctttagtatgcaaacgatcccggtgaacagcttaacggggcggatgacgaattcggtggaggaacgaacggttctgaccacaacccggatgattttggtgtatatcggcattcttttatccatttcctgtgcgacaccgcttgcaactgctatcggaggagaggatcaggcgtttggatttcaaatgacggcgctcatctatgcggctgtcagcatcgttttgaatctatttagtttcttttctgtacgggagcgaattcagcctaaaaagagaaaaaaacaagggatcaaaaagacattatccgttttattccgaaacaaacccttgcttatgttaatttcatcatttttggcttttgcgatcgggtttaatattaaactcagcacgatggtgtattattttacgtataacgtcaaccataaagagttcgtatttatgggcaccgttttatttttcggagcagcgctgatcagcaatttgtttattcctttcttttctgagaagtggggcagaaaacaagtcatgatcatcacggcagctctatcgcttatttcttatgccggcctgcattttacgccgtattcttccattacactcattttcatttggcttttcgtttcgggatttttcacaacgcctttaaatacgcttgcttggggaatggtggctgattgcgtcgattatgcggaatggaaaaccggagttcgcgcggatggtgttgtgatttcgagcatgagctttattaataagctgggtgttgcgttagccgggtcattttcggccatttacttaggaatcgccgggtatgtggcgaatacagaccagacagttgcgtcattgaatgcgattaaaaatatgaatgctttgattccgggatttttcattttgctttctattattcttatcgccttctatcctttaacggaaaaaagatataaacacatcatctctgagctggagcaaaggtctgcgagataaatagatgtaaaatttttaatattcaatgttgtatttatggcagaaagtaatatactgagactgtaatctagactttataaatgagtgtgataatatgcgtagtcattctgtagtttgtattggggaattgttgatcgatttcttttgtaccgatgttgacgttgatttaatggaagggcgccaattcctgaaaagtgccggcggggcaccggcgaatgtgtcggcagcaattgccaagctgggaggagacgccgctttcagcggaaaagtaggaaaggatccgtttgggtattttctgaagcaaacattggacgctgtacacgtcgatacctctatgctggtgatggatgagaaagcgcctacaacgcttgcttttgtttcattaaaacaaaatggagagcgtgactttgtttttaacagaggcgcggacgctttgtttacgctggaggatattgaccatgaaaaactaaacgaagcgaaaatccttcatttcggctctgcaacggcactgctatcagatccgttttgctcagcctatttacggctgatgtcgagtgcggaagacaatggacagtttatttcgtttgaccctaactaccgtgaagatttatggaggggaagagtctcagagtttgtaagtgttgcgaaaaaagcgatcgctgtaagtgattttgtgaaagtcagtgacgaggagcttgagattataagcggtgtgaaggatcatgaaaagggagttgcgatccttcatgagatcggagccaacattgtcgctgtgacacttgggaaaagcggaacgcttctttccaatggaaaagaccgtgaaatcattccaagcattccggtgacatcaattgactcaacaggggcgggagatgcttttgtcggtgcggctttatatcaattggcaaacacggatcagattcaatctgtagatgctaattttgtgaaactgcgtgagattgtgtcgtttgccaataaggtcggagctcttgtgtgcactaaaattggagcgattgatgcactgccgagcttggatgagattgaagtttctttgtaaacattgaagatgtttcttgaaagtctttggacttttggaggcatctttttttattgcttacatttttgttcgggtaaaaagttgtgtattttttgtttgaaatgtcattttttattaaaaaagtgaaacttttaacgataataaatagtatatgtaacaagggttaccgaatttgctttaggaggaacgatataatgagtataattggaagatttaaagatattatgtctgcgaatatcaatgctttattggacaaggctgaaaatccggagaaaatggtagatcaatatttaagaaatatgaatagcgatttggctaaggttaaggcagaaacagcagctgttatggccgaggagcagagagcaaaaagagaatatcacgagtgccaggcggatatggaaaagatggaaagctatgcaatgaaggcgctgcaagccgggaatgagagcgatgcgagaaaatttcttgaaagaaaaacatctttggagtcaaagctttctgagctgcaggcggcgaatcaaattgctgcaaccaatgccgcacagatgagaaagatgcatgacaaattggtatctgacattggagagctggaagcacgtaaaaatatgatcaaggcgaagtgggcagtagcgaaaacgcaagaaagaatgaacaaactgggcgcttctgtttcaagtacaagccaatcaatgtctgcattcggccgaatggaggacaaagtaaataaggcacttgatcaggccaatgcaatggctgaactgaacagcgctccgcaggatgatatggctgatctgactgcaaagtatgacactggcggttcaagccaggttgatgatgaacttgcggcgttaaaagcgaaaatgatgctcgataagtaatacataggaggccgcagctctcggctgcggcgtcattttatcataagatgtgagagggaacggtaatgataatatcttataagtgtccgaactgcggcagtgatatggcatttgacagtgaaaccggctcgttatcctgcagcagctgcggaagacaggacaatattgaaagccttccgaaagaaaacattgcggcacggttttctgatgatgaagcaaaagaatatcaatgtgaaaactgcggtgccgttttgatcacggaagctgaaacgacagcaacgacgtgcagcttctgcgggggtgctgcaatacttgccgatcgattatcaggtcatttggcaccggcgaaagtcatcccatttacaatcagcaagcaagaagccgagcaggcatttcgaaagtggtgcaaaaaaggccttctgacaccaagaggtttcatgtctgccgatcgcattaaaagcatcaccggcatgtatattccgttttggatgtttgatttaaatagtgaagtacaggtgagagcaaactgtaccagggtccaccggtatgaagaaggggattatatttgcacggaaacagagcactttgaagcatttcgtgatatcaatctcgattatttgaaaatccctgtcgatgcctctgaaaaaatgaaagacgaattaatggacaaattggagccttattcatacgaagagctgaaggactttcaaacggcatatttggccggttatattgcggaaaagtacaattataccgatgaggagctttttccgagagcaaaagagaaaatcagcagttatatagattcatacatccattctactttttccggatatacgtcagtcaatgtgagggacaaacatattcacacgaaaaacgtgaacagcttttacgttttgcttcccgtttggatggtcagttacgattatgaaagagcagagcatatctttgcgatgaacgggcaaacaggaaaggttgtcggaaagccgccgatcagtcgaggaaaagtggcggcatggtttagcggaatagcaggcgggacatttcttgcgttgaagctcgtctcattgatgatgggaggcggattttgatgcgtggattttttggaaaagcgatctttgttgtgctggctgttttcatcatgatgcctttactggggatcgaagcggcaagagcttctgaatcacagcagcatgtgtacgatcgcgctcatctattgtcaaaagcggagatcggaaaacttgaatctctctcggcagagctgggtgcaaagagggacactgatttcatcattattacgaccaaaagcacaaacggtgaagatattgcagactataccggcgatttttatgatcgttacggaaaaggcagtacagctattttaacgattgatatggcggatagagaagtattcatctcgggctacgaaaaagctgaaaagtatttggacaacagcaggctcaatagcatcagaaatacgatttcatctgatttatccaatgaaaattattttgaagcttttgagacatatattcagctttcctataaagatatgggcataaaaccgggagtaaaccccgacaacatattctttacatggtggtttcagctgattgctgccatcgcagtcgggggaattgcggtttcaatcatgctttatcatgcaggcggcaaagtaacggttaatggaaatacatatatggatcagcgtacgtctgatgtgattgatcaatacgacacttatattagaacgactgtaacaagagaaagaaaaccatcagataaagacagcggcagcgatggcggtgttacgaaaggcggcacgtcatacagtgggagccgaggcagtttctagtagaagaaaatagagaaagggagaggcgtaatgtcgtttttcagaaatcaattagcgaatgtagtagagtgggaagaatttagagatgatatgattttttataaatggaacaatcgtgaaatcaaaaaagggagccgtttaatcattcgtcccggacaggatgctgtctttttgaacaatgggcgggttgaaggagtctttcaagatgatggcgattatgatattgaatcagaaattattccattcctttcaacgttaaagggctttaagtttggctttaacagcggcatgcgagctgaggtgctgtttgtcaatacgaaggaatttaccgtaagatggggaacaaaacaggcgataaatattccggcagcgggaatgccaggcgggatacccattcgcgcaaacggcacatttaattttaaggtgcaggactatatcagcctgattgataaaatcgctggcgtgaaagatcaatattttgtagaggatattaaaacccgtatcatttctattctggatcagcttctcatgaagtggatcacaagagaagggaaagatatgtttaatcttcaagcaaacgcttttgatattgccaagggaattcaagaggacttggatatgcaattaataagcgacgggatgacggtcactggttttcaaatcatgagctttaattatcctcaagaggttcaagatatgattacaaagaacgcttcctatggtatggttggggatgtgaacagataccagcaaatatcaatgacggatggaatggcatccggaaagatgagcggaggcggagcggcttcggatatggctggaatgatgatgggaatgaatatggccaatcagatgatgaaccaaatgaatcaaaatcagcaggcacagtcatcaggcccacagtcaactggcagcggaagcaaaccgaatttctgtccaaactgcggaacaaaaacgggcgaagccaatttttgtccgaattgcggccagaagcttgtataagaatcatacagtgaaaagtccggagtgatcagacactccggacttttttatttaggagaataagcgttacctattgcttgctcctgaacaggccattttcgagcacccgcttggataattcccagcagcaattgacgacgttcctttattgaattgacggcaatttgaaatgtttgctttgataaagccggtatgcctgattgttgaagctttgagatatctggttccggcggcgcttgttctgcaggatggatataggcagtatgaacggtatccaggtagtttttgatacttgagcgcgcttctttgatgtgaagctgattcggctgatattgttcaggaattccgtatttgaaaatggttagagcctcatccaatacagcaacagctataatggatgattcctgatgctgcgtgctgtggtaaaaatgaaggatggggaaggcgttatgctgagcggtcagctttcccagttctgatgaggcagcgacaagaagaaaatcaatgtcgtgaaaatctttgccattccatgcattatggacgatttctgttccgtcatgtcctagacttaatacactttgggcaaaggagcgtttttgattaaccgcactcaagacggaaatcaaatacgtgacagaaaacgtgatggtaagcagtccttgagctgtttcaataatcgtgacaagcttccataggcctccgttcggagcgaggtcgccatttcctaatgtaaacatgacatagccggaaaaataaattcggtctgaccaggaagccggttcttttgattgagtttccataagtgagtgagggtcactcgagtaaatcaaaacccacccgctccaaaatagactgatccatatcactaacgtcaggcataacagcagaggaccagccatacttagaacctttgcgtggtcaccgctgattttgcggcaacccttccacagccaggcagacaggcatcttgtgatcgggccggcaccgctctctaaccataacgtggtccataaaaaatcaatcatccctgctgtcaataataaaaggcctgcaatgatataaccctcattcattttggttgcctcccttaagtcagccttcttttattttcttctctatttccttttatcctaagtctgaaacaattgaacgaatgtttgattttagatgaagttacccaaaacttactcatttatcgatatgaacagaaaatcacaggatttttgacttgattcacacatttttatgaagaaaaacgttcattttccccttgaattggtgattttccttttatagagtaaaaaattttcagaaatttatattgactgaaagcgtttttataattatgataatatcagatataacaaaaatgtcactattatattactacaattgaactatcaagtgactattaaatgccaaatttacaaggttatgcacaaagaaatgaccattgttcttttagcgagaaatgaaatcgtttccatcaggactgacatgctaagaagaagggaaggttatgaggttattggataaaaacatgaacaactattttctgaagcctgcttacgaaatgtgaggaaggcagcagccctggaataagtttttgacatacgcattttgaaaaagactgggggaaacagtatgaataaacaaggcaatcaaatgtcatttttacgtacaattattttagtctccacttttggcgggcttctttttggctatgataccggtgtgctcaatggagctttgccgtatatgggagagccggatcagcttaatctcaatgccttcacagagggccttgtcaccagttcacttctttttggagccgcgctaggtgctgtgtttggcggcaggatgtctgattttaacggccgccgcaaaaatattttgttcctcgctgttatattttttatttcaacgattgggtgcacgtttgcaccaaatgttacggtcatgattatttcccgttttgtgctcggtattgcggttgggggtgcatccgtaacggtgcctgcctatttagcagagatgtctcctgtggaaagcaggggacgaatggtgacgcagaacgaattgatgattgtatcaggacagcttttggcctttgtttttaatgcgatccttggaacaacaatgggagacaactcccatgtgtggaggtttatgctggtcattgcgtcacttccagccgtgttcctgtttttcggcatgatcagaatgcccgagagtccccgttggcttgtttctaaaggaagaaaagaagatgctttgcgtgtattgaaaaaaatcagggatgaaaaacgggcagcagctgagctgcaagaaattgaattcgctttcaaaaaagaagatcagcttgaaaaagcgacatttaaagatctttcagtcccatgggtgcgccgtattgtgtttattggattagggattgcgattgtacagcaaattacaggtgtaaattcgattatgtattatgggactgaaattctaagaaattccggtttccaaacggaagccgctttaatcggaaatattgcgaatggcgtgatttcggtattggcaacattcgtcggaatctggctgctgggaagagtggggcgccggccgatgctgatgacaggcttgatcggtacgacaacagcgttattgctaatcgggatattctcacttgtacttgaaggatcaccggcacttccatatgtagtcctgtcattaacggtcacatttcttgcttttcagcagggcgccatttcaccagtgacttggctgatgctatctgaaattttcccgcttcgccttcgcggactgggaatgggtgtcacggtattctgtctgtggatggtgaattttgcagtcagtttcacgtttccgatattgctggcagctatcggcctgtccacaacgttctttatcttcgttggattaggaatttgctctgtcctgtttgtgaagaggtttttgccggaaacgaaaggactttctcttgaacagctggaggaaaacttccgtgcttatgatcacggcggggcgaagaaggattctggggctgaagtgattggataattaaaaaaagaatccgcacccgagtgcggattctttttggtttcaaattagttaggtctgacaaggattttgacttggcttttctctttaataagagccccgaagccttcctcgatcaaatcatctagtacgatttttttcgttacgagtttgtcggctgagaaatagccttctttcattaatgacaatacagccgggaagatgtcacggtatccgataattccttttactgtacgttctttgattacgatatcgttcggatggatttcagcacctttttcccaaatgctgacgatgacggtttcaccggcaattgtagtggactggatggcttgtcgtaacaccactgggacaccagtgacttcgaatgctacgtcaacaccgcctcctgtacgttctgcaatctcagcgactacatcgtctgttttagacggatcaacgatgatcgcgccaagctcctcagctttttgctggcgttcaggagaaagctcaacagcgtaaatatcagttgcaccggcagccttcagcgcttcaatgacaagaagtccgatcgggccgcagccgaatacagccgctttgtcgcctgctttgagtttgcttgagcggacagcgtatagagcaactgcagaaggttcaacgagcgcgccttgttcatatgataattcatcaggaagtttgaacaaaagctcttcatctacagagacgtattcagagaaaccgccgcctccgccggctaagccgaggaatcccatttgttcatcaaggttgtaggcgccttggtggccgtgtgtagcaaaaatcggctcgactacgacgcggtctccaactttataattttcaacgccttctccgacttcgacaacttcaccggagaattcatgccccattgtgacaggtgccgtttcatttgttaatgggtgcggtttgtcaaccggaataaagatcgggccgcccagatattcgtgtaaatcacttccgcagatgccgcaccatttgactttgatctttacttttcccggctccgtttttggctcttcgatatgttcaatacggatatccttttggttatgccatcttgctgccttcatggattaccactcctataacttttgatgtgagtaattccgcaccggtcaatatgaactgttcacaaaatcgccatttttaaaaccaaaaaagaaatgaaatttttatataatataatctacgtttttttgaaaaaagaaactttgaagaaaaaagggtctcgcacactcttttttctttatatgagagtatcaatcgtttacatagctatgaatttggtttgaacaatacggtaatggttcgttcatattgaatgcgacaactactctatcaataattataacgctaatactgctattataataggataatcttccatggtttattttagcagagtaacttttttgactttgtaacattactgtaaggatattgaaataaaaaatagctggttgatcgtgtataatcttcctagatgttaacaaacagggggacgaaatgttgaagaaagtcattttagccgcttttatcttagtaggaagtactttgggagcttttagtttttcatcagatgccagtgcgaaacatgtgaacggaaatattacttggtataatggagtcgggaaaaaaggctcttcaggtaagaaacttggacattgggattgtgcgaccaaaatcggatttgatgttcctagaaacgggacaaaaatcagagcttatgcaaaagcgaagcctaaaaaggtgattacggtttataaaaatgatgttggcagaatgcctaatgcagtgctggatgttagccctaaagcgtttaaagcgcttggatatccattaagcaaaggtaaagtagcggggcattacagctattaatgtacatatataatctggaaagcaagaagtcacattcttgctttttctattggtggagataaaagatgaaaaaaagaatcatattattattagcagtgataatagcggcagctgccgcgggggttgcgttttatgttgcaaaggataaaggctatgagaaggctgctgatgtttcagtcaataccgaaagcggtgatgagctgctggtttcaattacagatacggatctgctgacaaagtattatgaaaatgacaaggtgatccatgaggagaagctgaccagctatccggcatttgccttggatcaaaaacagcaggtgctctattatacgggcaataatgaacagaatgaaatgaggctttttaaattggatctgaagtctcataaaaaaacgatgctttataaaggcgcggagagtgcggacagtttgtttttatcaaaggaccgttcaaccatctatttccgcttaggaaaagcggacgaaagcaattttcggatcgccgcttttgatctgaaaacgaaaaagtacaaaaatctttatcctgccgctaatgatcaggataacaccgtcagcagcttcttttataaccaaaaaaacgattcatttgcattgcttcattattctgtagaagaagactacaagaaaacagatgaagcaaacgaaaagggcatcgacccagaaccgacaacgattcattttgcggaaggccgccaaaataaatttaatgagctgaaaagcctgaaccaatttatcagcgatattgctgtttctgttgatgataaacgtattttattcacatcatatacgcaaaaaggaacggagcaaaccgcttctattcaaatgctcaatgcggatacgaaaaaatatgaaagcatcatctcaaatcaaaaatcatttaagctgttaattgacgcacagcctcagttctctaaggatggaaagaacatttattttcttgccgaagccaagggggctaaaaagctgaaggacgaaacagggcgtgaagctaaggtgcggacgatttattcctatagccttgaaaataagaccttcaaaaaagtatgggaaaatccgaacggcatcatcaacagcttttctgtgattaactaataaaaaccactcggcataagctgagtggcttttttaatggacgaggtgcagggctaatgattcgagccatttaaagatatgaatcagaggtaccgacaaaaacagaagttcaacatatgagttcattgcaacattcagctttttgaacgcagctctttttttcaagtctttttgctgctggtttgagatcacgttatcactcctcgtatatccatattataccattgaaacagacaaaaaaagccctaaacgtttacagttttgggcttctttcttcgtatttggcctcttgcaatgagaggcttttattctgaaatatagaattttgtctccgttcggggtttgttgcttgcgggagactgcatttgttatagggaagaactagcttgttttcgtttggctgttgttttggagattcactaatgaacggatgccgtcgaccattttacttccgcacaaagggcacaatggcgtatcactgctggcgaagttttttcgggtccagccattacagtcttcttttgtgcattcccaagtactcacatcttcttttggcagcggttcttgatttcgtttgttatagtaagacataaagtcacttcttccctcatgtattttactgcacatttcttattgtctcatacttttccctaatctcctaattcctttttctttatgactttccaataaccccatctaaaaaggagaggagtgtgctgttaaaagcatctggctcttctaaaaacgggcaatggctgcttttaggaaaggtaacgagtgtcgcgtttggaatattgctgcgcaagtgttccccagctgctgtagagaaaaatttcttgtcttccccgaagcacagcaatgtcggcacattgatgttttggagggtgccccggtaatcagcggccgtttggttaaataaaatcgtgctagaaatggcagccggctgtttgaggatttctgccagcatccattctgtttcggtctcggcaggcggttctgcgaacatattctggatgaagctttcgtagaaaggcagcgggtcagtttgaatggcgtgcatcgctgtttttaagccgtcaaaatcaaatggaccatgttcccagccctcccattgatagtccgaagcggattgatcgatgatcacagcggcttgaatgttatcattcccaaactgattgagataatcccatacgacaaaagcacccattgaccagccggcaagaacgacatgatcaagctccattgcatttagaaattcccttatgtcacgggcatattgggaaatggtgtggccgtgaagcactttgtcagattcgccgtgtcctctaagatcaagacgaatacattgataattggcagaaagcgccgaaaattgtttgtggaaaaattgtccgctcatcagcaccccatgtataaacaggatcggcgtcccgctcccgtgtgtttcatagtaaaggcgtgtctgatcttctaatgtgatgtatggcatgtttctcctcctttagtttccatcatgagtatggctggctgctgttgagctgatgatgacagctgtcgcggctgcctgctgcgcttgaatggctgtttcgatagcggtgtatagtcctgattccatcagcagatttttctccatatgctcactgagatagaggctgacagcaattttaaaattcatttccttttgccatttaaaagctttttcctggtttaattcgtcagtgatgcacaaaaccgttttgatatctggctcttccagaaatgtgaggagagcaaggtctggataatgataatcctttggttttttgacagattcagtgatcgattgatatatctgtttgcaagcggaaacaagcatttcgggctctttttcactttgcaaggccagaatatggctgacctgatgtaagtactgtccttttttaaagccgttggctgccagcagctgatagcatgtttccgccttctgtagcgcctgcaaaccttctccgttttctccaagcagtacggcaagcggaacattctgagttgaagtgaggaaataatgatttttcttcatctgctgataaactgctagccccatgttcatctgttctttttggtttgtcgtttcagattttccggtgagcaagatcagagcggaaaggtatgtgaacatatcccgcttatatcctagcttcaccatttcattgtatacatcgataaaagtatgaaatgtttgttttgcctcatgctgaaaatgaatgtccagaatagatgcaacagtaaagcggtggtgtgaattgagtgttgagaagctgccgatgtttgatttgatatagctgctcaaatcataaaagcgctgaaaatcaaactctcttttattcacaatatatgcagaagaaatgagcattaatatctgatcgtgtgaaactttccattttaattttgattttaatttagcataaatggaaatgtattgctttattttttcatgtagatcgtgtgtgagcataaaaagcagctccttttgttgtttttacgtaatacgataaatagggccaaaggtttcataaagaaaaaacttgcctgctagaggcaagtttgtcggattatttatggggatctgttatatccatcggtctcatcatgtcatagtcttcatgctctagaatatggcaatgccatacgtatcgtccgctgtacggaccgaatgtcgccgcgattctcaggacttcacctgcatgcgcttgaatggtgtctttccagcccttttcacttggcggcggcgggacagccggaccggtataggacaattccccgctttcttgataacgggcgatatcaaacggccgccggtctaatacacggaaggagactagatgcaggtgaatcggatgtgttccgcgtgtcgggttgataatggaccatatttcagtagtgccgacttttggtgcttctgtgacgggatcgtgccagcgtttgttattaagcagaaggacgggtctgccgtattcgtcctgggtgcctgccagttttaacgttctgatgttttgtattctttcatgctgtaccgaagggtatgaggcgaggtacttcggctttctgctttcgtctttttgtgccaatggttttgtgactctgaattgcatgatattagcatctgtttcaggattgacgtcaccgccacagcccgcgctgtttgccaaaatgatcgattctccttcatatgctgtgaagtcaatgatgatatcgtaacgttcagcaggcgcaaggctgaaagaattcagtttaacagatcgcggcaggagacctccatctgaaccaatctgaataaactctccgccattatcgagtgacaggttataggttcttgtattggaggcgttgatgactcggaatcggtatttcctcggctcgacctccaagtatggccataccttcccgttgacgagtatggtttctccgcaaaaagccggaacgattgaaggattaggcagtgacggagaagggttttccggtgcgctcggataaaacaaagaaccgtcctcattgatcgtgcggtctgtgataagaagcggcacatcgtattcgtctgaaggcagttttaagcgtttttcctttgggtcatgaatgatataagcaccgacaagtccggcatagacatttagcctggtgagcgccatggcgtgatcgtgataccacaatatagccccgcgctgctggtttggataatgataaacctctcttttgaaataaggtcctgtttgttcaaagtctttggaaaaccaagcctcgggatacccgtcactgtcatctggcgtgacgccgccgtgtaaatgaacaacagtctttacctcggactcttcatgctggctgtcactgtgatgaatggtgtgatcaatcggaaggaaatgcgtggaaggtaggttattcatccattttacatatacgttttcatttcttttaacctcaatggtcggtcccggaaataagccgttgtagccccacaggcgggtcggagggagatcgcgatggagctgatgggtgcattcctccatggtcacttcgtagtatgttttttcttttgattgctgtactggctttagtgtatctgggattgggagagcatccacaaatttttcaagtgtcattttcatctgtccttatctaaattttccaaattggtactatagttaatgacaataaggacgtgatggttacaaaaaatcttcgtgctgcagactgcccgagaaagaaaataacaaaatcctaaacggcagtccgtttaggatttgatcagcattaaggcaggatatcgggttgctgctgtgtgactgggttggcagccgctttctcgctcaccttgcgttttctgaacacaaggtaagaaatcagaacgattcccgtgatgacgcctgtcagcagcagctcgtctctcatggaatcaataaacgccatggacactaaaattccacaaatggcgatgatggtcaagtaggttaggaaagggaagagccacattttgatcttcaatgcttctgggtttgttttttcgagttttttccgcattttcagctgggaaacagcgatgacaagatagacgagtaaagcgattgcgcctgatgagttgactaagaataaaaagacggtatccggtgaaaaatagttcattacgaccgcgatataagagaaaaatgtgccggccacaatggcttgtacgggaacgccttttttgctcaatttcataaaacggcgcggcgcttcgtttctttctgcaagtgaatacagcattctggatgtggtatacaaacctgaattcaggcaagagagtacggctgtgaggacgataaagttcataatctgtgcggctgcgggcactcctatatgctcaagtacagcgacgaaagggctttctaaaatatttgctgaattccatggcaacagcgccacgacaatggcgattgagcccacgtaaaagacgatgatgcgccatacaacggatctggtggcttttgtcacagattcgatcgggttggatgtttcccctgctgcaatggcaacgatttcagttcccataaaagagaagatgacaacgacaatgccgagcaatacggagctgatgccctccgggaaaaatccgcctttgcctgtaagattcgaaaaaccgactggctcactgcccggtgcaaagccaaaaataaaggcaaaaccaacgattagaaaagcaatgatagtcacaactttaatgagggagaaccaatattcaaactcaccgaaagacttaacggagtagacgtttgtcagggtgagcacaatggtcaagatcaaacttgtcagccacagcggaatatcatggaaccagtattgaataatgccagcaccggcaatggcttcgatcgagatgacgatcacccagaaaaaccagtacagccagccgattgtaaatcctgcccacggtccgatggcgtcgtgagcgtattgagaaaacgatccgctcgtcgggtttacggcagacatctcaccgagcattctcataataaaaatcaccaataatccggctaacgcgtaagaaacaacggcacccggaccggtcgagtgaatcactgaaccgctgcctacaaataggccggctccgattacaccggcaatcgaaatcattgtcatatggcgggtctttaattccttttttaatcctgattgagattggttcataagttacctccttttaaaatgcaatcattactgaatattatgataattgaaactctatcataaatatacagtttgtcgaaaattcatgtgagaaaatataacgttttatttcaaatttgtagtgttttgtttgcgctttcagcgaatgtgtggaaaaaatgtttcgttttttatttgctgtgtgattttgtgtactatttacaattcgatagaatgcgagaagcgctggtgtcattggatctgatgggctttttggcggagcaaataaattggatgagagaaaaagtgttccatcgtcactatttttctgtggcgggtgaatcatgtttctgtagacccactgcggttcagctttgtaagataataataggaaaatgtgagcggggaggaggttttgtatggagagatatgatgaactgaaaaagggagaatccggggcgctggtcagcattgccgcgtatcttgttctttccgcaattaaactgatcatcggttatctttttcactcggaagcacttacggcagacgggttaaataacacaactgacattattgcttctgttgctgtgctgattggcctgcgcatctctcaaaagcctcctgacgaagatcatccatacggccactttcgagcggaaacgattgcatcgcttatcgcatcgtttattatgatggttgtcggcctgcaagtgctgttcagtgccggagaatctattttttctgctaaacaagagacgccggatatgattgcggcttggacggcagcgggcggggcagtcctgatgctgatcgtttatcggtacaataaaaggctggccaaaaaggtgaagagccaggcgctccttgctgcggctgctgataataaatcagacgcattcgtcagtatcggcacatttatcggcattgtggctgctcaattccatcttgcttggattgatacggtcactgcgtttgtgatcggtctgcttatttgcaagaccgcatgggatatttttaaagagtcatctcactctttgacagatggattcgacataaaggacatttccgcttataaacagacaatcgaaaaaatctccggtgtgagccgtttaaaagacataaaagcaagatacttgggcagtacggttcatgttgatgtggtggttgaggtatcggctgatttaaatattacggaaagccacgatatagccaatgaaattgagcggagaatgaaggaggagcatgcgattgattattcgcatgttcatatggagcctttagaacaaaaataatggagcttcctgccacaggaagcttttttgtgtgttttggccagctttattggaaacaatttgctagaatcgtttttttatacagattgctttttgtggtaaagttaggttacattatgatgaattttgtagatgactaggaggaaaagaatggcatatcaagaagacctgcatcctttgctggggaaagcagttgaacatattaatagagtaatggttggaaaacgagacatcgccatactcagcttagcagcccttcttgcaaaagggcatgtgctgcttgaggatgtacccggagtcggaaaaacgatgatggtccgcgcgctggcaaagtcaatcggcgctgatttcaaaagaatccaattcactccggatttgctgccatctgatgtaacaggggtatctatctataatgcgaaaacgatggaatttgaatatcgtcccggcccaattatgggaaatatcgtgctggccgatgaaatcaaccgtacctctccgaagacacagtcggctttgctcgaagcgatggaagagggaagcgtcacggtagatggccatacgatgcagcttgccgctcctttttttgtgatggcaacgcaaaacccggtcgaatatgaagggacctatcctttgccggaagctcagcttgaccgttttttattcaaacttcggatgggttatccgtcctttaatgaagagcttgacgtcttatctcttcaggaaaaaagccatccgattgagacgcttgagccggttattgcaaaagaagacttcatctgtttacagagggaagtgcaaaatgtccgtgctgatgacagcattaaggaatatatcgttgaaattgtgcagaaaacgagacagcatccttctgttcaattaggcgtcagtccgcgcggctcaatcgccctcatgaaagcggcacaggcatacgcgctgctgcatcatcgcgactatgtcataccggatgatattcaatatttagctcctttcacgctgccgcaccggatgatgcttcatcctgaggcaaaatttgaagggattcaggcagaagcgatcgtaagggagatcatgtcagctgtgaaggtgccggttcaaaggtcgtcggtccgctgatgaataagaaatggcaatggctcgtatatggttggaagctgattatattaactttattgacggctgctgttttttcttatgcgatgtttcagggcggctttgtcagctggtttttgttttacgcgtttctcccttttgtcttgtatgccgggctgttggccttgtatccgctccgttcttttcaggcttcaaggcaaatggataaaacacaattgcatgcgggggacaggctgggtgtaacggttacgctgagaagaaagctgccattccccctgatgtatatggtgattgaagattgcctgccagaaggtatcgagtcattaaatcgagacggagccgcggccaaacggctcgtttttccttggtttaaacggagcatgacgatgtcgtatgaattagctcgggtaccgcgcggagagcatcactttcattctgtcagggtgcgaaccggggatgttcttggcttgattgaaaaaacagcattttttgagctggatgataccctgtttgtttatccattctatcagcgtttttcctatcaggtgaatgagaggcatcaggaagacggtgtaagcggttcttctcctattcatcagcaccattcctcagtcgcagcaagtgtgcggaattatcagccgggagaccgatttgctgcgttagattggaagacatctgcacggcggagccagctgatgacgaaggaatttgagccttctcgcagcaaaaatctgtttctgctgatggaccgtttttcctcagacgcattcgaagaggtcgtttcagtgacagcttcgattcttcattctgttttaaaaaacggcgcgggtgctggtctggcttccatcgggaaggaaaaaaacattttccctattcaggaaggggatcagcattttaagcacatgcttcggcatttagccatcgctcattgtgatgcggcagacccgataagccgatatgcacgggaagagctgggaaagccatctgttcgccaagctgatcaagttgttgtcacgggacagttaacggaagatatgctgcacctcgcagaaataggaggcggccgggttacggtgatactggcaaaagagaaagatgctgagctctctcaagctgaaaatgtcatgattgaacgcatgatgaaacgccaaatcagagttcgggtcatgaggggcgggcgagtttcgcgtgttgtttagaaagagaggtgactggttcacatgccgcacgatgatcacaaggggagccgtttgagcttgctgttattttattttctggcttttttattgctgtgggagtggctcaggccgcttgacagttttactgaaacgaaacatacaggcttttttagtgtctttatcggcttgacgtttctgctgacttttttcaggatgaggtggtttgttaccgttcctttttgtgtcttatttacattgatctcgatacacatcctgttttatcaaggatctatattcgacttgagctgggtcagctcttttttgcaggatgtctatctgaatatcacgctgattcaatctgggcaatggaatgacatgattccttcatttcggaccctgctgttttttgtgctgctgtggctgctggtctatctcctgcattattgggtgatttaccagagaagaattttgtttttctttatgatgacagtagcgtatattacgattcttgatacctttacgccatatgatgccacttttgccgtcatccgtatcgtgctgatcggcttctttatgctgggccttttatacttggagcgcattaagctgatggaaagaatcacactgccaaaaacatctgtcctgaaatggtttcttcctttatctgtattggttttggctgcaacgggattcggactcgccgctccaaaatcagatccggcctggcctgatccggtgccttttcttaaaaaaatcactcatcaagaccgcgtgtctgcaggggaaagcaaaatcggatacgggaatcatgatgaatcactcggcggcccgttccagcaggatgctacacctgtttttacatggcagggaaaagagcgtacgtatttccgtgtggaaacgaaggatacgtataccgggaaaggctggattgaaacagacacaggcatgtcgtatcagcttagcaatggaaaagttgaaaatctgtggtttgaccataaggttgcgacagagcgccgcaccgtccgtgtaaaagtcgataagcactacgggtataatcatctgatgtatccgattggtgcggaaaccattcagccaaagcaggctgtctcacttgaaatgaacggcaacacggagcaaatttctccgatcagtgaacaagccggtgaaatcagaaatatgggaaattatactgtaacgtacaattccccggtctataagctggatgaactgagaaaggtaaaagtgagaaaaaacagtgaggagtacacattcagcgatcgctacatgcagcttccagattcactgccagagcgggtgagaacccttgcgatcaaactgactcaggatcacgacaatatgtttgataaggtgaaagcggttgaggactatttagggtcaaatgcgttcacatatgaaacagaaaacgtgaccattccgaagaatgatgaagattatgtcgatcaatttctctttgaaacgaaaatgggttattgtgataacttttcttccgccatggtggtgctcttgcgctcggccgggattccggcccgctgggtaaagggttatacgtccggcgaatacaaagaagcaggaaacaaaaatggcaacatctacgaagtgacaaataacaatgcccattcctgggtagaggtgtatttcccggaacagggctgggttacatttgagccgactaaagggtttacaaatccggctgaatttacttcttctcacacaaaggactccggcaacgataacagcagctcgccgaagaaagcaaaacagaaagaagaggaaaaacagccgcaaaaagaggaaaaacaaaaggaaaagcgggagccagctgtttctaaaaagccgtccgcttcgcatactaatgccggtgcgggcttgtatgcagcgcttgcggttcttgcagtcctcttggtggcagctgtattgctgtatgttttccgctcgttatggattcctgttttcaccgtgaggaaattgaagcggcgcagcgatcagcacgcgttttttgaggcatatgacgcgctgctgaaacaactgaagagaaaagggctgccgaaacgaggcagtgaaacgctgcgtgattatgcaaaacgaatcgatgaaaaatacgacatagaagacatgtcaaagctgacattaagctatgaaagggcgctttacagaaatgaagattcttcagcgctttggaatgattccagagagttatgggaaaatttaattaaaagaagatggtcttgaccgcttatcaacgtgttgttagaattagtgaatattatcggagtctgggagcgagttggcctgactccggcaaacggccttgccaaagagggcggagcgagcttcatatctgtcctcgtttttttctgtgtcaaaaaacttagaggagattaggtgacaaccatgacaaagttagtgaatgaaatgattcttgtccttgatttcggcagtcagtataaccagctgattacacgccgtatccgtgaattcggtgtttacagcgagctgcatccacatacattgacggctgaagaaattaaaaaaatgaatccaaaaggaattattttatccggcggtccaaacagtgtgtatgatgaaaactctttccgctgtgacgagaaaatcttcgagcttgatattcctgttttgggaatttgctacggcatgcagctgatgactcattaccttggcggtaaagttgaagcggcaagccagcgtgaatacggaaaagcaaacatccgcatcgaaggcacacctgatttgttcaaagatcttccaaacgaacaagtggtttggatgagccacggcgatttggttgtagaagttcctgaaggcttcactgttgacgcgacaagccatcactgcccgaactcagcaatgagcaaagcggacaaaaaatggtatggcgttcagttccacccggaagtgcgccactctgaatacggcaatgatcttctgaaaaactttgtattcggtgtttgcgaatgcgaaggcgaatggtcaatggagaactttatcgaaatcgaaatgcaaaaaatccgtgaaacggtcggagacaaacaggttctttgcgcgctaagcggcggcgttgattcctctgttgttgctgttttgattcataaagcgatcggcgaccagctgacttgtatctttgtagaccatggtcttctccgtaaaggcgaagctgagggtgttatgaaaacattcagcgaaggctttaacatgaatgtgattaaagtagacgcaaaagatcgattcttaaacaaactaaaaggcgtttctgatcctgaacaaaaacgcaaaatcatcggtaatgaattcatttacgtgtttgatgatgaagcggacaagctcaaaggcatcgactaccttgcacaaggtacgctttacacagatatcatcgagagcggtacagcaacggcgcaaacgatcaaatctcaccacaatgtcggcggacttcctgaagacatgcagtttgagctgatcgagccgttaaatacgctcttcaaagacgaagtgcgcgcgcttggcacagagctcggcattccggatgaaatcgtatggcgtcagccgttcccaggaccgggactcggaatccgcgttcttggcgaagtaacagaagaaaaacttgaaatcgttcgtgaatcagatgcaatcttgcgtgaagaaattgcaaatcacggcttagagcgtgatatctggcaatacttcactgttcttcctgacatccgcagcgttggtgttatgggtgacgcaagaacatatgattatacaatcggaatccgtgccgttacatcaatagacggcatgacatcagactgggcacgtatcccgtgggatgtgcttgaagtcatttcgacacgtatcgtaaacgaagtgaagcacattaaccgcgtggtgtacgatattacaagtaagccgcctgcgacgattgagtgggaataagtaaataacaatgagaaaaacgtccctttttcaaaaggggcgtttttttgttaactttttgaaaccgtttcgacaatttttgtatctaacaacataggaggtggataaggtgaaggaagacagattgattacaaaggcgagaaaaggaaatgctcgggcctttgaaaagcttatgctggcacatcaggagactttatataaaacagcttatctctatttaagaaataaagaagatgcacttgatgctgtacaggaaacggcttataaagcttttataggtatagaaaaactaaaagagccaaagtactttttaacgtggctcacccgaattcttattaattcaatttttgcaatgaagaaaaagaagggggaattagttccgtttgaaagccatcatgacactggcacggaccaaaggaatattgaagaatatatagacttgcgcaatgcgctggatacacttgatgaacatgttcagttaacaattcagctctattattttcaagattattcgatttcaatgatagctgaacaaacaggaatggcagaaggcacaattaaaacccatttacatagagcgagaaaagcattgaaacaggagctggaaaaggaggatcaaaacaaatggacaaacaccaaatgaagcagatatttgataacattgaagtgccaaagaaagtactcaaaaaggcaatacatcaagctgtcgttcgtgctgaaaatgaaagtaacacaaggcgccgttttaaatgggcacgaactattacaaatggaatggctattgctgctgtggtatgtatattgtatttatcatctggtctttttcttccctctgtaaacaaagcgatggggagcatacccattgtcggacaaatttataaggattttcaagataaagttggtctatcattgtttaaaagcaatttggtcacagctttaaatgaaaaagcagactccaggggaatcactgtttcggtaaacagctcctattacgatgccgggcagcttgtgtataactttactgttgataacctccagtctgatgaaaaagagctcagttataatgtgagtaaagcgagttttaacaataatttttcaatcaactacgattccttaatgctcaaaaaattaaataacaaacaatatgctggtcaattaaggctttatacaaaagggacagaaataaaaaatggggataccgtgccttttgtgattactcatatcaatgaaatacagggaaattggagattcaaactgcctattaccaaaaagaatgcgagttatttagaaagctcaaaagtggtatcagtgcttaacaatcattatcaattttccaatattcaagtggagaacggaaagctcggatctgtccttcaatttacaatcgattatcaaggcgtagcaaagcatgatacggttgaaattaacgaagtcaaagatgatttaggaaacacatatgagatgacagcgtcaaacatccaacttggagaccgcaaaaaagtaaacgagagaacggtaagagcaaaaggacaaacacagttagaatcaccaattaatccaaaggcaaaaaagctaacattaatagcaaatattaaatctgaggcagagggcagtgaaattgtcccgctaaatgcagagatgccgtttcatgtttcagaaacaaaccatcaaaacatagggattgaaatcaataacattaaccaaataggaaagaaagtattggttcattaccatttcactggaattgatacctcaagcgtggacgaaaataaattagtgaatatcggtgaaacgattggccttggtgatataaaaaaaatgcaatcttggcctgatccagtaggtgattatgaagaaggttattatttgaaatggaataaagctgaagtgaagaatatggacacagccgaaatggtatctacttttgaactggatgacgcttatcttgataagctgtctttaaagcattttgagtttaatgaatacggtctgtatattgataaaggcgttttaaatgacctgattcaactaaagccattctcgtttactgtaccagtgcatcaggtgagtcagcctaccgaaaaaaaataatcataagttgaaaagccgtatgttgccatacatacggtttttatcattgttaccaatttagtcaatagacgaataaaccaatttttttaataagtaatgttcgttgtttatattgtcaattcaaaatgaacttggtacaatagacacagaaatcaaataagatgaattcgtataatcgcgggaatatggctcgcaagtctctaccaagctaccgtaaatggcttgactacgtaaacatttctttcgtttgatataaataaaacacgtttatttattcaaactgaaatccgtctgtagtcaagcgtcccaaaattattggggcgttttttatttggcgatttcaggacagaataaatagcaaagagtgaagggagtcaaatagcttgaaaaagtattttcagtttgatgagctgggcaccagctatcgcaatgaaatcattggcggattaacgacttttttatctatggcatatattttgttcgtcaatccgattacgcttgctttggacagcgtgaaagattttccggaggcgctgagaattgaccagggtgcggtctttacggcgacagcgctggcgtctgcagcaggctgtatcttaatgggattaatagcgagatatccgattgccatcgcgccgggtatggggctgaacgcgttttttgcgttttctgttgtccttggtatgggtatttcatggcaggcagctttgtctggtgtttttatttcaggtcttattttcgttgctctttctttaacaggttttcgtgaaaaaatcatcaacgccattccgcctgagctgaaattggcagtcggtgcggggatcggcctgtttattacattcgttggcttacaaggctcaggaatcattactgcaaatccttctacgctcgtcacgatcggaaacattcacagcggtcctgtgctgttaacgattttcggtgtgattgtcacggttattttaatggtgcttcgcgtgaacgcaggcgtgtttatcgggatgctgttaacagcggtagccggcatgattttcggtttggttccggttccgactcaaattatcggcagtgtgccaagccttgcgccgactttcggacaagcgtggattcacctcccggatattttctctgtacaaatgctgatcgttattttaacattcttgtttgtcggattttttgatacagctggtacacttgttgctgtggcaacacaagctggtttaatgaaggaaaacaaattgccgcgtgcgggccgtgcgcttttagctgattcatcttctattgtgatcggtgccgtgcttggtacgtctacaacaacttcttacgtggaatcaagctcaggtgtcgctgcgggtgcccggtcaggatttgccgcaattgtaacagggattctctttttactggctacgtttttctcgccgctcctatcagtcgttacgtcaaatgtaacagcgccggcgcttattattgttggtgcattgatggtggcgccgcttggcaaaatcgcttgggataagttcgaggtggccgttcctgctttccttaccatgatcatgatgccgttaacgtacagcatcgcgactggtattgccatcggatttattttctatccgattacaatggtgtgcaaaggaaaagcaaaagaggttcacccaatcatgtacgggctgtttgtcgtatttatcctgtactttatcttcttaaaataaggaatgaaaaaccagctgcaccggcagctggtttttttgttgcaatagataaaaccatttcatacgatataccgtcatgtagatgtgccgccatgctttacttaaatggaaatgacttgactgttcaggaaggcttcggtaccttatataagtgttttattttcttgctgaatggtattccgccgtatttttttgataggagttgctgacatgacggaagaaagaaaagaaacgtttgaagaagaaattaaccagagtgaaagaatagatgcagatgaagaaccgctatcgagaatgtccagaaaggcgagccggcaaagcaagcagaagcaaaaacaaaaacagaaaccgcgccaggaacgcggtgaatcaactgttaaagtcaagcttgcgtctgtttgggcagccatcaacagatattgcggttttgcgttctcgattttaaaatctccggcgaaaactgtcgtaacggatggtttttctcattataagtacggtctgatttcaatgcttatattcagtatcattttttcaattgggaattggtttcagttaaaggcaagctggaatcggccgctcggtttcggagaacgccatcatgctttctatgacgggtttttagttgttcttgtgtatttgctgatctttttcgcggtaatggtctttgctatatgggctgtctcccgctatatgatgaagcagaaggtgacgttcagagaagcggctgccgtattgggttcattgcttgtaccggtaattgctgtttcaatcctttggctgatctttgcgatcgtaaatattccaatgctgacagtactgtttacggtgctgatcttgttttccatcttttttatcatcgcgctgtatgtacagcgtgtgtaccaggcggcacaagatgcaccaattgattatatctattgtgtatttgcagtggttgcgatagcgctgctgtttacggcagtgacttggccgtttatttctgaatattttacggcgtcgctgattccgctttaatgaaaaaaccggctaatcctagccggtttttttatgtcacactttttacaaatatatctaaaaaacatagttgatttgtaggattaacccgtgtatgatggggaaaatgctgaaaacgtccagcgcaaaaacctttatgtttaaggaggatgatggacatggctgatgtgcttcgccgagcaattaaccaaaagaagcaatttttaaaaaccaaattactgctctcggaattttatcaaggaagaggggaacagcttgcggactacacgctgagtgagcttgagaaagaatacaagtcccttcagaaaatgaaaaaagagatctgacaatagatataaagaggtgagtctgctgaaaagcgggcttttttgttttgattttgaaaaggcgagaaagagggtaaactactactgttcaacgcataaaagcatgtcgaaatattttgcttaagcttacgggcgaagctgattgtaaacggctcatttctctagtagaatatgaatgctttgtgcaagctgaagagtagggggatgaataaaatgatgcaaaccatcttatcaaatgggatagccatggttctcataattctcattattaatattgtctatgtgtcattttttacgataagaatgattttaacgctgaaaggacagcgttatttagcggccggcatcagtacgattgaaatactggtttatgtgacagggctgagtctggtgctcgataacttagatcagattcaaaatgtaatcgcgtacgcgctcggttacggtcttggcgtaattgtcggcatgaaaatagaagaaaaattggcgcttggctatattatggtcaatgtgattacgaaggagctcgatcttgatcttccgaagcagctccgcgaaaaaggctacggcgtgacaaattgggtggcaggcgggcttgaaggcgaccgcacagcccttcagatcctgacgccgagaagatatgaactccagctatatgatacgattaaaacacttgattcaaaagcctttattattgcgtacgaaccaaaaacaatccacggcggcttctgggtcaaagcggtgaagaagaggagaattaaagaataatggcaaagccgaagaagaaaaagtttgaagtgacagagcagcaaacgattgatgcggtgcttcagcaaatgaaagaagaaggatatctgcctgtaaggcgaatggaagagcctatttttatggaaaaaaaggaaaatgggtcaattcagatcgttccgtgcgggaaaaaaatcgtatttgaagggaaattgatctaaaacacgaacattagtagaaagaatttttgtatcgttcgataatatcgttgacattatccatgtccgttgttaagataaacatgaaatcaaaacacgacctcatataatcttgggaatatggcccataagtttctacccggcaaccgtaaattgccggactatgcaggaaagtgatcgataaaactgacatggatatatcgcagaagcgaacgactgacgatacatgtaccatgcccggtttgtattgcttcctcataagtgcaatgcagagcgggtattttttattttctgaaaacaaaagcattagaaggtggggaacagaatgcagccgctagtaggaatcatcatgggaagcacttccgattgggagacaatgaaacacgcatgcgacatacttgacgaactcaatgttccgtacgaaaaaaaggtcgtttccgctcaccggacgcctgatttcatgtttgaatatgctgaaactgctagagaaagaggcatcaaggtgattattgccggtgccggaggagcggcgcatctgccagggatgacggctgcgaaaacaacactgccagtcattggagttccggttcagtctaaggcgctgaacggaatggattcacttctttccatcgtccaaatgcctggaggcgtgcctgttgcgacaacatccatcggcaaagcgggtgctgtgaacgcaggcctgttagcggcgcaaattttgtcagcatttgacgaagaccttgcccgtaagctggatgagagaagagaaaatacaaaacagacagtgttagaaagcagtgatcggcttgtctaaacaaatcatctatccgggagctgtaatcggcattatcggcggcggccagcttgggaaaatgatggctgtgtccgccaaacaaatggggtataaagtcgcggtcgttgatccggtgaaagattcgccgtgcgggcaggttgcggatatcgaaattaccgctcattataatgaccgtgaagcgattcgaaaattggctgaaatcagcgatatcatcacatatgagtttgaaaacatcgactatgatgcgctgcattggctgaaagatcatgcgtatctcccgcaaggaagtgagctgctgctcattacccaaaaccgtgaaacagagaaaaaagcaattcaatccgcgggctgtgaagtcgcaccgtacagcatcgtcaaaacaaagaatgaattgaaacaggcggtacaggagctcgggttacccgcagttctgaagacatgccgcggcgggtacgacggcaaaggccaatttgtgataaaagaagaggcgcaaatggagcaggcagccggtctgttagaacacggaacttgcattcttgaaagctgggtttcttttgaaatggaactgtcggtgatcgtcgtcagatcggtaaacggtgaaatttcaacatttccgacagctgaaaacattcaccacaacaatattcttttccaaagcatcgtgcccgcacgggtagagaaagggattcagcagaaggctgctgatctcgcagttaagcttgcagatgagcttaaccttgtcggaccgcttgctgttgagatgttcctgacagaggacggagagcttttggtcaatgaactggcgccaagaccgcacaattctgggcattatacgctggacctttgcgagacgagccagtttgagcagcatatcagagcggtatgcgggcttccgcttgggaagacagatttgctgaagccgggcatgatggtgaatcttctcggcgatgaagtgaagcttgtggaggaagacccggagcttttaaaagaggcaaagctatatatatacgggaaacatgaaatcaaaaaaggccgcaaaatggggcatattacatttatgaagcagcctgaagacgaatggattcaggagatcacaaataaatggatgaatagagacggaggacaagcagaatgatcgaacgttattcaagacctgaaatgtccgcgatttggacggatgaaaacagatttcaagcatggctggaggtagagattcttgcctgtgaagcgtgggcggagcttggcgtcattccgaaagaagatgtaaagattatgcgcgaaaacgcgtcatttgacatcaaccgcattttagaaattgaaaaggacacgcgccatgacgttgtcgcttttacacgcgctgtttccgaatcattgggcgaagaaagaaagtgggtgcactacggattaacgtcaactgacgttgttgatacggctctttcctacttattaaaacaggcaaacgatattttgctcaaggatcttgagagatttgttgacattataaaagaaaaagcgaaagaacataaatacacagtcatgatggggcgcacgcacggcgtacatgctgagcctacaactttcggcttaaaacttgcgctttggcatgaagaaatgaaacgtaatcttgagcgcttcaaacaagcgaaagcaggcatcgaggttggaaagatttctggcgctgtcggcacatatgcgaacattgatccatttgttgaacaatatgtctgtgagaagctcggattgaaagcagcaccgatttcaactcaaacccttcaacgtgaccgccatgctgactatatggcaacacttgctttgatcgcgacaagcattgagaaattcgctgtggaaatccgcggactgcaaaagagtgaaacacgtgaagtagaggaatttttcgcgaaagggcaaaagggttcatctgcaatgccgcataaacgaaatccgattggctctgaaaacatgacaggcatggcgcgcgtgatccgcggctacatgatgacagcttacgaaaatgttccattatggcatgagcgcgatatttctcattcttcagcagaacgaattattcttccggatgcgacaattgcgctgaactacatgctgaaccgcttctccaacatcgtgaagaacttaacggtcttcccggaaaacatgaagcgcaacatggaccgcactctcggccttatctattctcagcgtgtgctgcttgctttgattgacacaggccttacacgtgaagaagcctatgatactgttcagccgaaagcaatggaagcgtgggaaaaacaagtgccgttccgcgagcttgttgaagcggaagagaaaatcacgtcacgtctttctccagaaaaaattgctgactgctttgattacaattaccatctgaaaaatgttgatctgatctttgaacgtttaggtttagcatagaagaagcttttagcggcttcttctaagccgccgatgtttgaaaattcccaacattcgggttaggaggccttccgtgaatattgtgaagaatgaacttttatacgaaggaaaagcaaaaaagatctacaaaaccgatgacgaaaacacgctgtatgtcgtgtataaagactccgccactgcctttaacggcgagaaaaaagcagaaatcagcggaaaaggacgcttaaataacgagatttcaagcttgattttcaaacatcttcatacaaagggcattaacaatcactttatcgagcgcatttcggaaacggaacagctcattaaaaaggtaacgattgtgccgcttgaagtcgtggtcagaaatgttgtggcaggaagcatgtccaaacgtctcggcattccagaaggcacggagcttgagcagccgattatcgagttttactacaaggatgacgcgctgggtgatccgctcatcacagaagatcatatttggcttttgaaagcggcgactcctgagcaggtagaaaccattaagtccattacaaaaacagtaaatgaagagcttcaaagcattttcgacgattgtcatgtcagattaatagatttcaagcttgaattcggtttagatgcagaagggcaagtgcttttggcggatgaaatttctcctgacacatgccgcttgtgggataaagacacgaacgaaaagctggataaagatttattcagacgcaatctgggaagcttaaccgacgcatacgaagagattttcaaaagactgggaggcattcatcatgtataaagtaaaagtttatgtcagcttaaaagaaagtgtactagatccacaagggagcgctgtccagcatgccttgcacagtatgacttacaacgaagttcaagatgtgcgcatcgggaaatacatggagcttaccattgaaaaatctgaccgtgatcttgacgtgctagtgaaagaaatgtgcgaaaaacttcttgcgaacacagtgattgaagattacagatatgaggttgaggaggtagtcgcacagtgaaatttgcggtgattgtgttacccggctccaactgtgatatcgatatgtatcatgctgtaaaggatgagctcggccatgaagtggaatacgtctggcatgaggaaacaagtcttgacggcttcgacggtgtgttaattccgggagggttttcttacggcgattacttaagatgcggcgccatcgcccgatttgcgaatattatgccagctgtcaaacaagcagcggctgaaggaaaacctgttcttggcgtctgcaacggattccagattttacaggagcttgggctgctgccaggcgcaatgagacgcaacaaagatctgaagttcatttgtcgtccggttgaattaattgttcagaacgacgaaacattattcacagcttcctacgaaaagggagaatcgattacaatcccggttgcccacggtgaaggaaatttctattgtgatgacgagacgcttgcttcattaaaggaaaacaatcaaattgctttcacatacggctctaatattaatggaagtgtcagcgacattgccggtgtcgtgaatgagaaaggcaatgtattaggcatgatgcctcaccctgagcgcgcggtcgatgaactgcttggaagcgccgacggtcttaaattgttccagtctatcgtgaaaaattggagggaaactcatgtcactactgcttgaaccaagtaaagaacaaataaaagaagagaaactgtatcagcaaatgggtgtcagtgatgatgagtttgcattgatagaatccattcttggaagattgccgaactacacagaaatcggaattttttctgtcatgtggtctgagcattgcagctataaaaactcaaagccgattctgcgtaaattcccgacaagcggcgagcgtgtgctgcaggggccgggggaaggcgccggaatcgttgatatcggtgataaccaagcggttgtgttcaaaattgaatcacataaccacccatcagctctcgagccttaccaaggcgctgcgactggcgtaggcggaattatccgtgacgtattttcaatgggtgcccgtccaatcgctgtattgaactctcttcgatttggtgaactgacttcaccccgcgtgaagtacttgtttgaagaagtagtagcgggtatcgccggatacggcaactgtatcggcatcccgacagtcggcggagaggtacaatttgacagcagctatgaaggaaatccgcttgtcaatgccatgtgcgtcggtttaatcaatcatgaagacatcaaaaaaggccaggcgaagggtgtcggcaataccgtaatgtacgtaggagcgaaaaccgggcgtgacggaatccacggcgctacgtttgcttctgaagagatgtcagactcatctgaagaaaagcgttctgctgtccaagtcggcgatccgtttatggagaagcttttgcttgaagcgtgtctggaagtcatccaatgcgacgccttagtcggcattcaggatatgggagctgccggtttaacaagctcaagtgcagaaatggcaagtaaagccggttctggtattgaaatgaaccttgacctgattcctcagcgcgaaacaggcatgagcgcgtatgaaatgatgctttctgaatcacaggaacggatgcttttggttattgagcgcggacgtgagcaggaaatcatcgatatttttgacaagtacgatcttgaagcggtttctgtcggacgtgtgacagatgataaaatgcttcgcctgacacacaaaggagaggttgtgtgcgagctgcctgttgatgccttggcagaagaagcaccggtttaccataagccttctcaagagcctgcttactatcgcgagtttttggaaacggacgttccggctccgcaaattgaagatgcgaatgaaacgctgaaggcccttcttcagcagccgacgatcgcgagtaaagagtgggtgtatgatcagtatgactacatggtgcgcacgaatacagttgtcgctcctgggtctgatgctggtgttctcagaatccgcggaacgaaaaaggcgctggcgatgacgacagactgtaacgcgcgttatctctatcttgatcctgaagtcggagggaaaattgctgtcgctgaagcagcgcgcaacatcatttgctcaggcgcagaaccgcttgcggtcacagataaccttaacttcggaaacccggagaagccggaaatcttctggcagatcgaaaaagcggcagacggcataagcgaagcgtgcaatgttctcagcacaccggttatcggcggtaacgtatcgctttataacgaatcaaacggcacggcgatctatccgacaccagttatcggcatggtcggcctaattgaagatacagcgcacattacaacacagcatttcaaacaagcaggagatctcgtatacgtgatcggcgaaacaaaaccagagtttgcgggaagcgagctgcaaaaaatgacagaaggccgtatttacggcaaagcgccgcaaatcgatcttgatgtagagctgtctcgtcaaaaagcactgcttgacgcgattaaaaaaggcttcgttcaatctgcgcatgatgtgtctgaaggcggcttaggcgtagcgattgcggaaagtgtcatgacgacggaaaaccttggcgctaatgtgactgtagaagggggagcggcattattattctctgaatctcaatcccgcttcgtcgtttcagtgaaaaaagaacaccaagaagcgtttgaagcaactgtcaaagatgcggttcatattggtgaggtaacagctgacggaattctggcgattcaaaaccaagacggacaacaaatgattcatgcgcaaacgaaagagcttgaacgcgtatggaaaggagctatcccatgcttgctgaaatcaaaggcttaaatgaagaatgcggcgtttttgggatttggggacatgaagaagccccgcagatcacgtattacggtctccacagccttcagcaccgaggacaggagggtgctggcatcgtagcgactgacggtgaaaagctgacggctcacaaaggccaagggctgatcactgaagtatttcaaaacggcgaactcagcaaagtaaagggaaaaggcgctatcgggcacgttcggtacgcaacggctggaggcggcggatacgaaaatgttcagccgctcctcttccgttcccaaaacaacggcagcctggcgcttgctcataacggaaatcttgtcaatgccactcagctgaagcagcagcttgaaaatcaagggagcatctttcaaacctcttcggatacagaggttttggctcacctgatcaaaagaagcggacacttcacgctgaaggatcaaattaaaaactcgctttctatgctgaaaggcgcctacgcgttcctgatcatgaccgaaacagaaatgattgtcgcacttgatccaaacgggctgagaccgctatccatcggcatgatgggcgacgcttatgtggtcgcatcagaaacatgcgcatttgacgtcgtcggcgcaacgtaccttcgcgaggtagagccgggagaaatgctgatcattaatgatgaaggcatgaaatcagagcgtttttccatgaatatcaaccgttccatttgcagcatggagtacatttatttctccagaccagacagcaatattgacggtattaacgtacacagtgcccgtaaaaaccttggaaaaatgctggctcaggaatccgcagttgaagctgacgtcgtaaccggggttccggattccagtatttcagcggcgatcggctatgcagaggcaacaggcattccgtatgagctcggtttaatcaaaaaccgctatgtcggcagaacgtttattcagccgtcccaggctctgcgtgagcaaggcgtcagaatgaagctgtctgcggtgcgcggggttgtagaaggcaaacgcgtcgtgatggtggatgactctatcgtacgcggaacaactagccgccggattgtcacgatgcttagagaagcgggtgcgacagaggtgcatgtgaaaatcagttcaccgccgatcgctcatccgtgcttttacggcattgatacttccacacatgaagaattaatcgcgtcttcgcattctgttgaagaaatccgtcaggaaatcggagccgataccctctcatttttgagtgtggaagggctgctgaaaggcatcggcagaaaatacgatgactcgaattgcggacagtgtctcgcttgctttacaggaaaatatccgactgaaatttaccaggatacagtgcttcctcacgtaaaagaagcagtattaaccaaataaaacttgaaaaatgacataaaggcagcgcagttcggctgcctttctctttctgccctcattcggggagatattttgaaaagcgccttaaaggagtgaataggatgtctgaagcatataaaaacgcaggagttgacatcgaagccggatatgaagctgtaaaacgaatgaaaaaacacgtggagcgcacgaaacggcttggcgttatgggcagccttggcggttttggcggcatgtttgacctgtctgagctttcttatcaaaaaccagttctcatttcgggaacggacggtgtcggcacaaaattaaagctcgctttttccatggataagcatgacacgattggcgtggacgctgttgcaatgtgtgtcaatgacgtgctggcacaaggtgcagagccgctgtttttcctcgattatttagcggttggcaaagcggacccagtgaaaattgaacagattgtacaaggtgttgcggaaggctgtgagcagtcaggttcagccttagtcggcggtgaaacggctgaaatgccggggctctatacagctgatgaatacgatattgccggtttctcagtcggagtggcagaaaaggacgaaatcgtgactggagaaaacattgaagagggccatctgttgatcggtctcagctccagcggccttcacagcaacggcttttcccttgtcagaaaagtgcttctggatgatgcggagctggacctcgatacaacatatgagccgtttgaacgcccgcttggcgaggaattgcttgaaccgacaaggatttacgtgaagcctgtgcttgccgcggtcaaaagcggaaaaatcgacggcatggcgcacgtgacaggcggaggatttattgaaaatattccgcgtatgcttccggaaggcttaagtgcggaaattgatcatggctcatggccgatcccgccaattttttctttcttgcaagagtacggcaagctaaaggaagaagacatgttcaacgtctttaatatgggtatcggttttgttttggcagtcaaagaagagcatctgacagatgtgatcggaacgcttgaaagccatggcgaaaaagcctatttaattgggcgtgtgaaaaaaggtgaaggcgtcacattcggcggtgcggcactttcatgaaaaagtttgcggtatttgcatcaggaaacggttcaaacttcgaagccatcgtcacgcgtttgaaggaggagaactgggatgcgtcagcagcgctcctcgtttgcgacaaaccgcaggcgaaagtcatcgaacgggcggaagcattccacattccatccttcgcatttgagccgaagtcttatgaaaacaaggctgcatttgaacaagccatcattgaacagcttcgtcttcacgaggttgaattgattgttcttgccggctatatgaggctgatcggtgatacgctccttcaagcatatggaggaaaaatcattaacattcacccgtcgcttcttccggcgtttcctggaatcgacgcagtcggacaggcgttccgggcgggtgtaaaggtggccggaatcaccgtgcattatgtcgatgaaggaatggatacaggtccgatcatcgctcaaaaggctatcgaaattgatgagcatgatacattggaaacaatcgaacagcggattcacaagcttgagcataaatggtatccgagtgtgattaaacagctattaggattaaataacagaggtgaaaaggcatgaccattaaacgtgcattaatcagtgtttcagataaaacaaatctcgttcctttcgtaaaagaactgacagagcttggcgttgaagtcatctccacaggcggaacgaaaaagcttcttcaagaaaacggtgtggatgtgatcggaatttctgaagtgacaggctttcctgaaattatggacggccggttaaaaaccctacacccgaatattcacggcggccttctggcggttcgcggcaatgaagagcatatggcgcagatcaatgaacacgggattcagccgattgacctcgttgtcgtcaacctctatccatttaaagaaacgatttctaaggaagacgtcacatatgaagaagcgatcgaaaatatcgacatcggcggacctggcatgctgcgtgcggcatcaaagaaccatcaggatgtcacggttatcgtcgatccggccgattacagcccagtgctgaatcaaatcaaagaagaaggcagcgtatctcttcagaaaaaacgcgagctcgcggcaaaggtattccgtcatactgcggcatatgatgcactgatcgctgactatctgacaaatgttgtcggtgaaaaagaaccagagcaattcactgtgacatttgagaaaaaacaatcgcttcgctatggagaaaacccgcatcaggaagcaactttctatcaaacagctcttcctgtcaaaggctccattgcgcaagcagaacagcttcacggaaaagagctttcttacaacaacattaaagacgcggatgctgcagttcaaatcgttcgtgaattcactgaaccggctgctgttgctgtgaagcatatgaacccgtgcggcgtgggaacaggaaaaacgatcgcagaagcgtttgacagagcgtttgaagcggataaaacatctatcttcggcggcattatcgcgctgaaccgtgaagtggacaaggcaactgccgaagcgcttcacaacattttcttagaaatcatcattgcgccttcattcagccaagaagcgctcgacgtcctgactgcgaagaaaaatctccgtctgctgacgcttgacgtatccgccgctgttcaaaaggaaaaacagctgacatccgttcaaggcgggctgctgattcaagatttagatatgcacggcttcgatgatgctgagattagcattccgacaaaaagagagccgaacgagcaagagtgggaagacttgaagcttgcttggaaagtcgtgaagcatgtgaaatcaaatgcgattgttctcgcgaaggacaacatgacagtcggcgtgggagcaggccaaatgaaccgcgtcggatcggcaaaaatcgcaatcgagcaagcaggggaaaaagcgaagggcagcgcgctcggttcggatgcatatttcccaatgccagatactgtcgaagaagcggcaaaagcgggcgttacagccatcattcagccaggcggatcgatccgagatgaggattccatcaaaaaagcggatgaatacggcattgccatggtattcaccggcatcagacacttcaaacattaaggggatgaaaacgacgtgaatgtattaattatcggtaaaggcggaagagaacatacgctggcgtggaaggcagcgcaaagcagcctcgtcgagaatgtatttgcagctcctggaaatgacggcatggaagcttccgcacagcttgtaaacattgaggaaagcgaccacgcagggcttgtctcgtttgcaaaagaaaaccaggtcggcctaaccattgtcggccctgaggttcctttgattgaaggtctggtggatgaatttgaaaaagcgggtctgcgcgtgttcggcccgtcaaaagccgcggcgatcatcgaaggaagcaaacagttcgctaaggatttaatgaagaaatacgacattccgaccgcagaatacgacacgtttacatcctttgatgaggcgaaggcatatgtgcaggaaaaaggtgctccgattgtgataaaagcagatggacttgcagctggaaaaggcgttactgtggctatgacagaggaagaagcaattgcatgtctgcatgactttcttgaagatgaaaagttcggtgatgcgagcgcgtccgttgtcattgaagaatatctttctggtgaagaattttctctgatggcctttgtcaaaggggaaaaggtgtatccgatggtgattgcccaggatcacaagcgtgcgtttgacggagacaaaggtccgaatacaggcggaatgggcgcttactctccagttccgcaaatttcggaagaaacggttcgccatgctgtagaaaccatcgtgaagccggccgcaaaagcaatggtacaagaaggccgttccttcactggcgttttgtacgctggattgatgcttactgaaaacggctcgaaggtcattgaatttaatgcccgtttcggcgatccggaaacacaggtcgtgcttccgcgcatggaatctgatctggtacaggtgcttcttgatcttttagatgataaggaagttgacttaagatggaaggataccgcggcagtgagtgttgtgcttgcatcagaagggtatccggaaagctatgcaaaaggcacgccgatcggcagccttgcagcagaaactgagcaggtcgtggtcttccatgccggaacgaaagcagaagatggagagttcgttacaaacggggggcgcgtcgccaatgtgacggcttttgatgaaacgtttgaagcggctagagaccgagtgtacaaagcggttgatgaaatattcaaaccgggactctttttcagaaaagacattggggcacgcgctttaaaggctgcccaaaaataagtgaggaaaacccgcagaatagctgcgggttttttgttatcaaaaagcgggatggcagctggaagaagaaaggacaacgagcgtggttggttttccatgggccatcgaggcgtcaataaaatcctcaagcgtatgtaccgattcagtcacgacctttgtcacatagctgtacatccctgtgatgcggtggttttctgctacatcagggtgcgcttttgcaaaggcggcgtagtgcttgcagcttttcggctccatgagaatgaaagcggtgacatgcttgtttagtttttcataacagatattcgcgctgtacccggtaatcactcctttgtcttcaagcttcctgacacgctccgccgcgcttggcgaactgagtccgacaagctttcccagctcaaccatcgttaatctgccgtttcgctgcaaatgcgagagaatctgaaggtctgtatcgtccatttgtccggctcctttacatatttaggcgaatgaatgaaaattcctttgatcgtaaggtaatgctgttgatttaacttcattgtagcatatggatgccgtcttattttttctataataaagccatcaatcagagaggaggcatcatgttgccagaattacagcgctctattacttggatacaagggacggcgttaacgattggggcggttttaggatgcgggatattaatcctgccgtctgtcactgcggatacggccggtccggcttctttatttgtctgggtattcatgtcttttttatcttttcttctcgtcggcacgctggcacggcttgtgaaaattgcgcccagcgcgggaggaatcactgcttatgtgcagctggcctttcagaaaaaagccggggctattttgggctggatcatgttaggttccgttccgattggcgttcccatcatcgctttgactggcgcgcattacgtcagttacatcacagaggcggccgattggcagattacattgattgctggttgcatgctggctatatctattttgcttcatatgagaggcattcaactatcagcaaacatcagtacaatcgttatttgtgtcatcgtatttctgcttgtcacttctattgctgtgtcattgccacacgtcacgatagcagaattcaagccgtttcttccgcatggctggtctgccgctggatctgtttcagttatgatttttttctcttttgtaggctgggaaatgattaccccgttggctgaggaatttcatcgccctgaaaaagatgtcccgctcagcttgtttttggcagcgtcttgtgtggcagggctgtatatcatgctgtcatttgtgacggtggggactcattcatatggagagaatggagaaattgcatcgcttgccatgctcatttcaaaaggagcaggggaaagcggtgtatacgtcacggtatgtttagcgctgtttattacattcgctaccatccatgccaatattgctggtttttcaagaatggtgtacgcattggcgagagaggggcacatacccgtattttttggaaaactcagtgcgacaaaacgtacgcctatccgtgttttgacagcgatggccgcagtgtttggcttagtgcttgcggcgcatggtctgtttcaaatcgatttgacgactctgttgaaagggccgagcgcggcttttatcgcatcttacatatgtacaatggcggcagcactgaaactgctgggcaggagagatataggctggtggatggcgctcggggcatttgcggcgtgcgcggtgatttattcattcagcggctgggcactgctttatccggcagtgctggcagctgcaggatatttctatatgaaaacaaaggatgggcataaaaaaaagcttgatcacgttttgtgattaagcttttccatttatccgttttgatgctcgttatttccagaatcactgtgttgaaacatgtaggtcacaggacagaagcgcaagattcccgaacccgctttcatggcccccataaagatgtaaaagagatgcattctgcaccaaggttttttcgtaaactttgcactggcggctgacataatcgtcaatccgcaggcgattctgaacacggcattgatgagactgatgtttggcttcaaggaaatccgctccttttacttaaaaaagttttttaaccgaaccttcaaaaatttgtaacgtttttatcgtgcgtgatgaggaaggatgtgataccatgagtctaatacatgtaaaggagagtatgtgaatgtccgaacgcacctttaactggaaaaacaaagacatcagggcacaggttgatgttgtagactcaaagctgcttccaacgctccttttacggaatgctctcgtcttaaatccatatgtaaaacaatggctgaaaaaaaacatttggatttatcaggaccgcattgtttatgtgggtcatgaacttccgaatagagccgaagaaattcatacgattgattgtgaaggaaaatacattgtgccaggttatattgaaccgcacgcacatccttttcaaatatataatccccaaacactggcggaatatgtgtctcaatacggaacaacaacattcgtgaatgataacttatttttgcttttgcaaagcggaaaaaagaaagcgcttacgattttgaatgaactcaaaaagcagcctgtccagtatttttggtggtcacgctatgacctccagaccgaggttctgaacgaggaccacgtccttccatttgacgtcagaaaacagtggattgaacatccggatgtgattcaaggcggagaaatgaccggatggcctcgcctggtagatggtgatgatttaatgctccactgcatgcaagctacaaagaaacagagaaaacgcattgaagggcattttcccggcgcttctgataaaacgcttacaaaaatgaagctgttcggtgcagattgtgatcatgaagcgatgtcaggtgatgaagtgatgagaaggctggaactgggctattatgtttcccttcggaactcttccattcgccctgatgtaagaaaaatcttgcaagagctgcatgagaagggcttccgctattatgaccacttcttttacacgacagatggcgcaaccccgaatttctataaaggcggcatgacaaacgagctgattcgcatcgcgttagaagaaggcgtacctgcaatcgacgcctacaatatggcatcatttaatatcgcaaagtattaccaaatggatgattatttaggagttgtcggaccgggtagactggcatcgctcaacatactggaagatccgttaaatccgaatcccgtgactgttctgtcaaaagggactattctgcgtgaagacggctgtgatttgaaggcgtttacaaaggcggactggcacaaaggtggtcttgtcccgcttgagctttcatatgatatgacgatggatgacttgcagttttctatgccgatgggcgtgaaaatgcggaatgcggttattatggagccgtatatgattgagattgacaattcgatggaacagctctcgtttgaccatgatgaaagttatttgacgatgctcgacagacacgggaaatggcgcgtcaatacgatgataaaagggtttgcctcaagcgtgcagggatttgtaagctcctttacgacgacgggcgacattgtcgcgattggaaaaaataaagcggatatgctgctcgctttcgcccggatgaaagaaatcggaggaggaattgttttagcggagaacggaaacattttgcatgaaatcccgcttgccctgtgcggctgcgcctcttcggaagcgtatgaagaagtgcttgagaaggaacaaaagctgagagatcttttgactgaaagaggctatgagttttgcgatcctatctatacgctgctctttttgcaaagtacgcaccttccgtatatacgcattacgccaagaggaatcttcgacgtcatgaaaaaaactgtactctttccatcgataatgcgttaaaatataaaagagcagggagccgacatatgaaaaaatggatgacagtttgcgcgctgtgtttcgtgttttttctgctggtatcctgccagcagaaggatgctgtcccggatactgcaaagaagctgaaagctcctttaacggggctaaagactgaacagaaagtgactgaacgccgccctgttgctgttgtggtgaacaatcacccgaaggcgaggccgcagtcgggtctgtctaaagccgacattgtcatagaagcgctagccgaagggcaaatcacaagatttctggccattttccaaagccagatgcctgaaactgtcggacctgtgcggagcgcgcgggaatatttcgtcactctcagcaatggctttgacagcatatttgtccatcacggctggagtcccggcgccaaaaagcagctggaatccggagctgccgattatatgaacggattggattttgacggaagcttattttggagagctgatttcagcaaaccgccccacaattcctatacgtcttatgattacataaaaaaggcggcagaacaaaagggttataagctgaagcaggaaacaaatccgctgctgtttcaaacatcagatgcaaaacctgcaaatgaatcttacaatgttcgggtagattatggaacaaaaaacgttacaaatcttgtcgaatacaactatgataaaaaagctgaatcttatacaagaagctctgatggtgtcataacgacagaccgggaaaccggaaagccggttgcaatgcaaaatattttcattgttgaagccagccatcatattattgatcaagatggaaggcgggacatcgacttggtatcaggaggaaaaggtctgttgtttcagcacggaaacgtcattgaaacagactggaaacaagtgaatggcagaattgtgccgataaaagacggcaagtggcttccgtttgtgccaggaaagacttggatcaatatcgtacctgatcttgatgcggcttccattagtaaaggagaaggtgtgtaacgatgcaaatcgataaattacgcggcaaagagctggaccagttatttaactcgatcttatcgctgaaagacctggaggaatgttaccgattcttcgatgatctatgcacaattaacgaaattcaatcgctggctcagcgccttgaagtggcgcgcatgcttcgcgaaggaaacacgtatcataagattgaaacagaaacaggcgcttccacggctacgatttcccgtgtgaaacgctgcttaaattacgggaatgacgcttatgaaatggcgcttgaccgtgtgaaggagacggaaactgagtcttcttcaaaataataaacaaccgccctgccgttcggcaagggcggtttctttatgaaacaaattgatggatcaggttgtcgatatcgatgatactgccatcctctttccgatagacaacatgctccttggaaaagtgaatcggcgaattgatccctgctgcggctgcaaggttaaatagtccctcgcgcaatgaaataacgtagttgcagacacgatgctgtttttcctcaacgctcagtgctttttgcaatttcggatctgtcgtcgccacacctgccggacatttgttggtgtggcagacgagagcgcggatgcagccaacggaaaacatcatgccgcgtgcgatgttgacaaagtcagcgccgagggctaaggcgaccgcgattttatcaggagtcaggagctttccggaagcaaagattttcagctggctgcgcaagccgtactgtttaagaagcgtgtcaacaataggcagcgctgtcataatcggaaggccgactgtatccgcgagctcgtaaaaggaagctccggtaccgccttcacttccatcgatcgtgataaaatccggatgttttccgcttttctgcatatgagagaaaagctcatgcaattcttcaggatgccctgcgaccagtttgatgccgactggcttttgtccgacatctctaagtttttcaataaagtcgagcatttcaggagggtttgagaattcataaaagcggttcgggctgtcaatcgactttccaggttcgacattccgaatgtctgccacttcctctgatactttggcgccatccacatggccgccccgggttttcgctccttgtgccagctttagctcaaacgctttaatctggtcaatcctgctttttcttttaaattcctcccacgaaaattccccgtttcttttgcgcacgccgaataggcccggtccgatttggcaaatgatatcggcgccgccctttaagtgatattcagacaatcccccttcacctgtattcatccaggtgccgcctgcctgatggagcccttttgagagcgccgtaacagcccgttctccaagagaaccgtagctcatggcagactggccgactaagcccttcacataaaatggcttctcgcatgtacgctcgccaatcacctgtacatcatcaggatggagaaaatacgggtctgccttgatatgttcggcatgctccttgcgtttgaacagattgtcagcatccattttatagatttgggtttcaattttgggcgtttgatttacgtgcatttcttccctttgttttggaaacatagcgttacggatataatagccaggtttatcaaaatctcttacagatccaaagcccatcattctgcttttgtatttgccggagatgacggtttgctcatattcctttcgtgaaaaaggctgctcctcattgtcattgctgtataaatactgtctgagctccggcccgattttttcaaggatataccgaaaccttccgatgacgggatagttgcgaagaattgagtgctcctgctgtttttcatcctttatgtagatccaggcaaacaagacgatcgggatagcgatgatccctatgataaatgcgatgagtgctattatgatggtttccatctctcagcctccctttttatgtaaccatttccacagttgaacactttccaaacaatagcagaaggaatctggtgaaaaatgtgtgcttctgccgatacaggactcagagagcaggtactgccatatgctctttttttatgaaaatagaatcaaaacacctttttcagtgaataacgagattaacggctttttccgtttttccgcgctatgtgaatttgttataatgtttaaatggtaacaaacgaatggaggaacgtatgacgtgtacgatgtaacggagtggaagcatgtctttaaactcgatccaaataaagatttgcctgacgaacagctggagattctttgcgaatcaggaacggatgcggtcattatcggaggcagtgatggtgtaacagaggataatgtcctgcggatgatgtctaaggtaagacggtttttggtgccgtgtgtccttgaggtatcagcgattgaagcgatcgttcccggctttgacttatattttattccgagtgtattaaacagcaaaaacgcggattggattgtcggaatgcaccagaaagccatgaaggaatacggagaactgatgtctatggaagaaatcgtggcggagggctactgcatcgcaaatccagattgcaaagccgcggcactgactgaagcggacgccgatctgaatatggatgatattgtcgcctatgcgcgtgtgtcggagctgctgcaactgccgattttttatttagaatacagcggcatgcttggagacatagaagctgtcaagaaaacgaaggctgtattggaaacgtcaaccttgttttatgggggcggcatcaaggatgcggaaacggccaagcagtacgcagagcatgcggacgtgatcgttgtaggcaatgctgtgtatgaagattttgacagggctttgaaaacagtagcggctgtgaaaggcgagtagtaaattgtacggatttggtttatgatagaacatatgttttgtataggcgggtgaacaaattttgaattatattagcaatcaattactaagcggtttaaaccccgttcagcaggaagcagtcaaaacaacggacgggcctcttttgctgatggcgggagcgggaagcggaaagacgcgtgtcctgacccatagaattgcttatttaatggcggaaaagcatgtggcgccgtggaacattctggcgatcacatttacaaataaagcggcacgcgaaatgaaagaacgtgtggaaagcatcctcggacccggcgcggacgatatctggatttccacattccacagcatgtgcgtgcggatcttgcgcagagatatcgaccggattgggatcaaccgaaatttctccatccttgatacggctgaccagctttcagtgatcaaggggattttgaaggagcgcaatcttgatccgaagaagtttgacccgagaagcatcctcggtacgatcagcagtgcgaaaaacgaattgaccgaaccggaggaattctctaaagttgctggcggctactacgatcaggtggtcagcgatgtatatgctgattatcagaagaagctattgaaaaaccagtcgctcgatttcgacgatttgattatgacgacgattaaactgtttgaccgagtgccggaagtacttgaattttatcagcgcaaattccaatacatccatgttgatgagtatcaggatacgaacagggcgcaatacatgcttgttaagcagcttgccgagcgtttccagaacctttgcgttgtgggggattctgatcagtcaatctacagatggcgcggcgcggatatcaccaacatcctttcatttgaaaaagattatccgaatgcaagcgtgattttgctagaacaaaactatcgttcaacgaaacggattttgcgcgcggcaaacgaggtcattaaaaacaactctaaccgcaaaccgaaaaatttgtggacggaaaacgatgaaggcatcaaaatttcctattatcgcggtgataatgaattcggagaaggacagtttgtggccggcaaaattcatcagcttcacagctcaggcaagcggaaactgtctgatatcgccatattataccggacaaacgcgcagtcccgtgtgattgaggaaacgcttctcaaagcgggcttgaactataacattgtcggcggcacaaagttctatgacagaaaagaaattaaagacattcttgcgtacctgcgcctcgtatccaatccggatgacgatatcagtttcacgcgcattgtcaatgtgccgaagcgcggagtcggcgcgacatcacttgaaaaaatcgcttcgtatgcggccataaacggcttgtcatttttccaagcgattcagcaggttgattttatcggcgtcagtgccaaagcggcaaacgcgcttgacagctttagacagatgattgaaaacctgaccaatatgcaggattacttatccattacagagctgacagaagaaattcttgataagacggaatacagagaaatgctgaaggctgagaaatcgatcgaagcccaaagccgtttagaaaatatcgacgagttcctgtctgttacgaaaaactttgaacagaaaagtgaagacaagacactcgttgcgttcctgacagacttggcgttgatcgcagatattgatcagctcgatcagcaggaggaagagtcaggcggcaaggatgcgatcaccctgatgacactgcacgccgcgaaaggactggagtttccggttgttttcttgatggggcttgaagaaggcgtcttcccgcatagccgttcactcatggaggaagcggaaatggaagaagaacgccgccttgcgtacgttgggattacaagggcggaacaggagctttatctgaccaatgctaaaatgcgcaccttgtttggccggacaaatatgaacccggaatctcgcttcattgctgaaataccggatgatttattggaaaacctaaatgagaaaaaagaaacgagagcgacgtctgcgagaaaaatgcagccgagacgcggccctgtttcacgcccggtatcctacgccagcaaaacaggcggcgacaccttaaactgggcagtcggagataaggcgggccataaaaaatggggaacaggaactgtcgtcagcgtgaaaggcgaaggagaagggacggagctcgatattgcctttccgagccctgtcggcgtgaaacgcctgttagcagcatttgctcctattgaaaagcagtaattgaagaggaaaggaagaagcagatggacaaagaaacagcgaagcagcgggcagaagaactgcgccgcaccatcaacaagtatagctatgaatattacaccttagatgaaccgagcgtcccagatgccgaatacgacagattgatgcaggagctgattgcgatcgaggaggagcacccagacctcagaacgcctgactctcctacgcagcgcgtcggcggagccgtgcttgaagcgtttcaaaaagtcacccacggcacaccgatgctcagtctgggcaacgcctttaatgctgatgatcttcgtgatttcgaccgccgtgtgcgccaagccgtcggcgacgatgtggcgtataatgtggagctgaaaatagacggtcttgctgtttctctccgttatgaagacggctattttgtcagaggggccacaagaggtgacggaacgactggagaggatattacggagaacctgaagacgatccgcaatatcccccttaaaatgaaccgtgagctgtcaatcgaagtgcgcggagaggcgtatatgccgaaacgttcgtttgaagcactcaatgaggaacggattaaaaatgaggaagaaccgttcgccaatccgcgaaatgccgcggcgggatctctcaggcagctcgatccgaaaattgcagcgaaacgaaacctcgatatcttcgtctacagtatagcggagcttgacgagatgggtgtggagacgcaaagccaagggcttgattttctcgacgaactcggatttaaaacgaatcaggaacgaaaaaaatgcggcagcatagaagaagtcatagtgctgatcgatgagtttcaggcgaagcgcgcagacctgccgtatgaaatagacggcattgtcattaaagtcgattctctcgatcagcaggaggagctcggttttacggcgaaaagcccgcgctgggccatcgcgtataagtttcctgctgaagaggtcgtgacgaagcttctcgatatcgaattaaatgtcggcagaacgggtgtgatcacgccgaccgcgattcttgagccggtaaaagttgccggcacaacggtctcaagagcatcccttcataacgaagatttaattaaagagaaggacattcggattttggataaggttgtcgtcaaaaaagcgggcgatatcatcccggaagttgtgaatgtcctcgttgaacagcgaacaggagaagaaaaggaattcagcatgccgacggaatgtcctgaatgcggcagtgagctcgtccggatcgaaggagaagtggcgcttcgctgcattaaccctgaatgtccggcgcaaatccgggaagggctgatccatttcgtttcccgcaatgccatgaacattgacgggctcggcgaacgagtgatcacacagctgtttgaggaaaaccttgtccgcaatgtggcagatttatataagctgacgaaggaacgagtcatccagctcgagcgcatgggtgaaaagtccactgaaaacctgatcagctccatccaaaaatcaaaagaaaattcgttagagcgtttgctgtttgggcttggtatccgttttatcggatcaaaggctgcaaagacgcttgccatgcattttgaaagcttggagaacctgaaaaaagcctcaaaagaggaacttctcgcggtagatgaaatcggtgaaaaaatggctgacgcggtcatcacctattttcataaagaagaaatgcttgaactcttgaatgaacttcaggagctgggcgtaaacacgctctacaaaggcccgaaaaaagtaaaagcagaggacagcgactcttactttgccggtaaaacaattgttctgacaggaaagctggaagagctgtcaagaaacgaagccaaagcgcaaatcgaagcgctgggcggaaagctgactggaagcgtcagcaaaaacacagacttagtcatcgccggagaagcggcgggaagcaagctgacaaaagcacaagagctgaacattgaagtgtggaatgaagaacagttaatgggagagctaaagaaataagaggagtgttttctattgaaaaagacgttggcattggcggcaacggcggcagtattaatgctgtctgcctgctcgtcaggttttgggggggagaaggaggaagagattacgcaaaagacggcgaaatcgtcagaaaaagcgattgtcccgaaatataatatctctgactcctattacaaaatggtgctgccgtttaaggcaggcaaagcgcgcggcttaacaacggaacagctgaacactaggctggacattgacgagtttgaaacagggctgatgcgtcttgcccaagattctttctcgactgacgattatctgttccaagaaggacaatatttagatgaggatacagtattaagctggctggcacggaaaaaaacgggctctgatttgaaaaaagccgaaaaagaagataaaaacttcaaaaatgaaggcttgaacccggcgctcccgagttctggttcaacagaagaaaagaacgaaagcagcccgatttatttagcatccatgcttgagcacgattatttagtcagaaaagacaagaattctatccagcttggcggcgtcatgatcggactggcgttaaactcagtgtattactatcgtgaaaaaactggcgacccgcaaaaagaagtggagattaaagacagcacgcttcgccagcagggagaaaaaattgcacaggaggttattaaccgcctccgcaaaaaagataacttgaagaatgtgccgattaccgtcgcgctctacaagcaggcgtcaaaaacatcgattgtgccggggaacttcatcgccaaaacagaggtcaaagcaggctctactgatatctcaaattgggatgacatcaatgaaaaatatgtattctatccggcagatacaaccacagcagaaaaatacccggatgacaccgaggtctttaagcggttcaaaaactcaattgaagaatatttcccgaactatacaggcgttgtcggtacagcgctgtatgaaaatgatgaaatgaagaaaatgaagattgacataccaatgcaattctacggaaaaagtgaagttgtcgcgtttacccagttcttaacgggtgaagtgatggactactactctaagagctcagttgatgtcgaagtcaatatcacgtcctcagacggacaggaagcggtcattatccgcaatgccggagataaagagccgactgttcacatttatgactgatagaaaacccttgtgccatattggcacaaggggttttatgttacaattaacaggaaaagggaaaatatttccgcttctgccgaaacacaaatcaaggggaggtatgttgatgctggaaatcgtgtgaaaacaatcattatcaaatctatagcaatgaaaggatgttagacatgcataaagatatcaaaaaaatatttgaggaagagcaggttttggcagaagctgcagcgagatacggtttctcaaaagatcaggtgcgttttctggctgatgcggaaaactatgtatatgaatgtatgaaagacaatcaaccttatattttaaagattacccatacgattcggagatcttctgattatataatgggagagatggaatggctccgtcaccttgcaataggaggaatttcagtagccaaaccgctcccgtcgctgaacggaaaagatgtagaagcagtgccggacggaaacggcgggtcatttttattgagagtgtatgagaaagcgccggggcaaaaagtggatgaatcggactggaatgaaacgctattttatgagcttggcagatacacaggcagcatgcacagcttgacaaaaagctacaaattgagcaatcccgctttcaaaagacaggaatgggatgaagaggagcaattaaagctgagaaaatatgtacctgaagatcagataaaggtgtttcagcaagccgattatttgatgaatgaactgcggaggctcccgaaaagccaggacagctacggcttggtgcatgcggatctgcaccatggcaattttaactgggatcatggcaaaatcacggcatttgattttgatgatatcggctacaactggtttgttaacgatattagcattcttctctacaatgtcctgtggtatcctgttgtgccatatgatgataaagctgcgtttacagaagaatttatgacgcattttatgaaagggtactgggaggaaaatgagcttgaccctacatggctgatgataatacctgatttcctccgccttcgccatatgctgatttacggattgctgcatcagatgtttgaccttaacacaataggagaagaggaaaaagaaatgctggccggtttcagaagagatatagagaatggcacgccgattacagcatttgatttttcagcactggtgtagatagaaaaagccaatgggattccagtcccattggcttttataatgtatcacacttcacgccgactacgccttcaatggctttaatgtcatagtagacatcggtcgtgtatctgtttttatggacgcggaccttcacttccataattggaaaatccttttcgcctaggtcgtcgatccgaacggagtgtgctttgatatctcttcttttcatttcttttaaaatctctgtcattttgtctttatcagaaagtgacattctgatgcggatgtctttttcctgcaggcggtcggggccgatttttctgaccacccatgggagaaattccacgctgatcaggatgaacagaagactggcaaacgcttctttataaaaaccggctcccgtagccagcccgagccccgctgccccccagatcatggccgatgtcgtcaggccggaaatgacatcattgctttttcgcaggatgacaccggctccgataaacccgacgccggagatgatttgtgccggcagacgaagcggatccatcatgatgcggtagtatttagggaaatgatatgccgcattaatactgacgatcgtcagcatgcatgagctgactgcgatgacgatacaggtttttaatccgagcggcttattttttaattcgcgttcaagcccgatgaccatgccaatcaatgtggcaatgcccaatttcaataaaatatcaggatcaatataccagctcaacagcaacttcccccttctctaaggtgtttttaaataaatatgattttctcacagtatttatagcaaaacaagggtacaaaagccaccaagctgcgcttgatggcttattgcttactttttgcgttttaacagcttttccatgacaccgaataatcggtaagaggcttttgcaggacgttttgtgatcatgctgacaatgatgccggcaatcatactgagaataaacccagggatgatttcgtacacaccggttgattttgccaggccggttgtaatccagatcaacacggtcgcagccccgacaatcatggcagcaagcgcgccccattcgttcattcgcttccaatacagactgagcagaatcgcaggtccgaaagctgaaccgaagccggcccaagcgtatccgaccaaatcaagaatggtgctgttcgggttcaatgacaagagtaccgcgataacggcaatgactaagacggacaatcgcccgatcatgaccaattctttatcagaagcttttcgtctgaaaaatgaccggtataaatcctctgttacagcacttgctgtgactaagagctgtgaggaaatcgaactcatgatggcagccaaaatagctgacaataagaaccctgtaattaatgggtggaacaagattttagagaagataatgaaaatcatctccggatcttttacagcaactccgaatttatgggcgtatgcaacaccgattaaacccgtcagcacggaacctagaactgtaatgatcatccagctcataccgattcggcgtgcaggttttaaatctttaatgtctttaatggccataaatcggacgatgatatgaggctggccgtagtagcccaacccccaggctaaataggaaataatgctaatgacgctcgcgcctttaaaaatatccaataagtgtgggttaacagcgtcgatttcatggaaagtcggagcaacgccgcccacatgggtaaaagcaacgatcggcacaagcactagtgctgcaaacatgatcgcaccctgcacgaagtcagtcagactgacagcaaggaaaccgccaaacagtgtgtataatacgacaactgcggtggtcagaaacaagcctaatttgtaatccgcaccaaaagcagattcaaacagccgtccgccagataccataccggaagaggtatacaatgtgaaaaagatcatgatgatcaatgcagatacgattttcagcagtgatgaagaatgctggaatcgtttatcaaagaaatcaggaatcgtaatcgcatcatccgccgcttctgtataagcacgcagccttggagccagcagcaagtaatttgagtacgccccgattgtaagacctaaagcaagccataaggtggacagccctgtcgcaaacatcgcgccgggaacacccatcagcatccatccgctcatatcggccgcgccggcagacaaagcagtaacgaatggtccgaggcctcttcctccaagcatgtaatcattgatgtcagtggttttcttgaatgcataccagccgattaacagcatggcaataaagtaaattcctaaagatataataatttcaatactcacgttttaccctctcttcatttctaataatgttgcatcacctctcaaattgatggtgccagttaagcagcctggcgtaagtgcaaaacaaaagaaattcctttgcgggtgcacttggtaacttaacctaacaaagtattcccggccattcaagcgatgaaaccttgatcatgagcggggaaaaccgttgcaaacctagaagggaataaagaataaaacgctttcaagaaataattaaagtaaaaatattcagaaaaatatttcgtttctccttctcctcattttagtataaaatatatagggtattgtttcgaaaacacaggcctgtctcaaggcgttttgttgctttaaagggcttgtttttgatatgatcagtattatatgacttaacggagaaatatgtggaggtggatcatatgtcacgaatttcaatagaagaagtaaagcacgttgcgcaccttgcaagacttgcaattactgaagaagaagcaaaaatgttcactgaacagctcgacagtatcatttcatttgccgaggagcttaatgaggttaacacagacaatgtggagcctacaactcacgtgctgaaaatgaaaaatgtcatgagagaagatgaagcgggtaaaggtcttccggttgaggatgtcatgaaaaatgcgcctgaccataaagacggctatattcgtgtgccatcaattctggactaaaggagggacacaagaatgtcattatttgatcataaaatcacagaattaaaacagctcatacataaaaaagagattaagatttctgatctggttgacgaatcttataaacgcatccaagcggttgatgataaggtacaagcctttttggcattagatgaagaaagagcgcgcgcatacgcgaaggagcttgatgaggcggttgacgggcgttctgagcacggtcttcttttcggtatgccgatcggcgtaaaagataatatcgtaacaaaagggctgcgcacaacatgctccagcaaaattctcgaaaactttgatccgatctatgacgctactgtcgttcagcgccttcaagacgctgaagcggtcacaatcggaaaactgaacatggacgaattcgccatgggatcatctaccgaaaactcagcttacaagctgacgaaaaacccttggaacttagaaacagttcccggcggttcaagcggcggatctgcggctgcggttgctgcgggagaagttccgttttctcttggatctgacacaggcggctccatccgtcagccggcatctttctgcggcgttgtcggattaaaacctacatacggacgtgtatctcgttacggtctggtcgcatttgcgtcttcattagaccaaatcgggccgattacacgtacggttgaggataacgcgtttttacttcaagcgatttccggcgtagacaaaatggactccacgagtgcaaatgtggacgtgcctgattttctttcttcattaactggcgacatcaaaggactgaaaatcgccgttccgaaagaataccttggtgaaggtgtcggcaaagaagcgagagaatctgtcctggcagcgctgaaagtccttgaaggtctcggcgctacatgggaagaagtgtctcttccgcacagtaaatacgcgcttgcgacatattacctgctgtcatcttctgaagcgtcagcgaaccttgcacgctttgacggcatccgttacggctaccgcacagacaacgcggataacctgatcgacctttacaagcaaacgcgcgctgaaggtttcggaaatgaagtcaaacgccgcatcatgctcggaacgtttgctttaagctcaggctactacgatgcgtactacaaaaaagcgcaaaaagtgcgtacgttgattaagaaggatttcgaggacgtatttgaaaaatatgatgttattgttggaccgactacaccgacacctgcgtttaaaatcggtgaaaacacgaaggatccgctcacaatgtacgcaaacgatatcttaacgattccggtcaaccttgccggcgtaccgggaatcagcgtgccatgcggattagcagacggacttccgctcggcctgcaaatcatcggaaaacactttgatgaaagcactgtataccgcgttgctcatgcatttgaacaagcgacagaccatcataaagcaaaacctgaactgtaaggggtgaaaagaattgaactttgaaacggtaatcggacttgaagtccacgttgagttaaaaacaaaatcaaaaattttctcaagctctccaacgccattcggcgcggaggcgaatacgcagacaagcgttattgacctcggatatccgggcgtcctgcctgttctgaacaaagaagccgttgaattcgcaatgaaagccgctatggcgctcaactgtgagatcgcaacggatacgaagtttgaccgcaaaaactatttctatcctgacaacccgaaagcgtatcagatttctcaatttgataagccaatcggcgaaaacggctggatcgaaattgaagtcggcggaaaaacaaaacgcatcggcatcacgcgccttcaccttgaagaagatgccggaaaactgacacacacaggcgacggctattctcttgttgacttcaaccgccaaggaacgccgcttgttgagatcgtatcagagccggatatccgcacgccggaagaagcgtacgcgtatcttgaaaagctgaaatccatcatccagtatacaggcgtttctgactgtaaaatggaagaaggctcacttcgctgtgacgccaatatctctcttcgtccgatcggccaagaggaattcggcacaaaaacagaattaaaaaacttgaactcctttgcgtttgttcaaaaaggccttgagcatgaagaaaaacgccaggagcaggttcttctttccggcggcgtcatccagcaagaaactcgccgttatgatgaagcaacgaagaaaaccattcttatgcgtgtcaaagagggatctgacgactaccgttacttcccagagccggatctagtcgagctctacattgatgatgaatggaaggaacgcgtaaaagcaagcattcctgagcttccggatgagcgccgcaagcgttatatcgaagagcttggcttgcctgcatatgacgcgatggttctgacgctgacaaaagaaatggctgatttcttcgaagaaaccgttcaaaaaggcgctgaagccaaacaagcgtctaactggctgatgggtgaagtgtcagcttacctaaacgctgagcaaaaagagcttgccgatgttgccctgacacctgaaggccttgccggcatgatcaaattgattgaaaaaggaaccatttcttctaagatcgcgaagaaagtgtttaaagaattgattgaaaaaggcggcgacgctgagaagattgtgaaagagaaaggccttgttcagatttctgacgaaggcgtgcttctgaagcttgtcactgaggcgcttgacaacaatcctcaatcaatcgaagactttaaaaacggaaaagaccgcgcgatcggcttcctagtcggacagattatgaaagcgtccaaaggacaagccaacccgccgatggtcaacaaaattctgcttgaagaaattaaaaaacgctaataaaaaagcagcccttagaggctgctttttttatggtcaaattgagataaagacagagatgagggcccgaagcctttcaacttctttgtcgttggttccggtcaaattggacagcatgcctttaataatcggcttgcgcggtttatcctgagtcaattcttcctcgataacatcaagtgacacggtgatatcctcgggcagcgtgctgttttctttcactttctgaatgtcctcaagcagctggtcttttcccgcaggcatcgggttgaaaatgtcttttgatacaatcggattgagtgcagaacggctcagcccctgtacaagatcattcagtctctcaataataaaggctgagatttcttctgcatcgatattaagctcaccgttaaataccatcacgttcatataggaatgcacaatgcctcttgccatgatggacagatctgcgacataccgctcgattccttcgccataggataccagcaaggcgttccggtacagcttatccgtctccatggttactttgtaaaagtattgcttgatttcttgattttccggaatgatattttcggtaagcaaaagaacgataaaatctttatgatcgcgaaaatcctcaaattgagcgccaatttgcttttttaacacttccttagggggctttccggcgagatcttcttctatatttttcattttgttcatagacataccgatataatattcacaggcagataacagcagcgcttctttcgatttgaagtgcaaataaaaagcgcccttcgaaatgccgcattcactggcgatttcttggatcgtcgtagctgcgaatccttttttcgcaaataaacgaatgctggtttttatgattctctcttttttttcattcatgacgtgcttccccttaatccttgaaaaatttagtaaaattttctggtatatgagttgacgttgttgcgttataacgtttagtattatatagaatgaccagtcagtcaataaaaaatgtaatggaggatatgatgaaccacgttattaatttcgttctgaaaaacaaattcgccgtatggctgatgacgattattgtaacggcagccggcttgtatgcgggtatgaatatgaagcaagagtctattcctgacgtgaacatgccttacttgacgatcagcacgacatatccgggtgcaacaccaagccaagtggctgatgaagtgaccaaaccggttgaacaagccgtacagaacttggacggtgtcagcgttgtgacgtcgacgtcctatgaaaacgcatcgtcggtcatgattgaatatgattatgagaaagatatggacaaagcgaaaacagaagcagctgaagcgttagaaaacgtcaacctgcctgatgacgcgaaggatccggagatttcacgctacagcttgaactcattcccgattctgacgctgagcgtgtccagtgataaagataatctacaagagctgacgaaacaagtggaggacagcctcgtttctaaacttgaaggcatagaaggcgttgcgtccgtccaagtatcaggccagcaggtggaagaggttgaattctctttcaaagaagacaaactgaaggaatacggccttgatgaagatacagtcaagcaagtgattcaaggttcagatgtgacaactccgcttggattgtacacattcggaaatgaagaaaaatctgtcgtcgtcagcggcgatattgaaacaattaaagatttgaagaatatgagaatcccgacggtatctgcttcaagtgcaggcagcagcgcagcatctcaagcgggtgcgcagagtgctcaagcagcccaaagcgcacaagcggcagcacaggcgcagcaaagcgcaagcacagcagtgccgacagtcaagctttctgacattgctacaattaaagatgtgaaaaaagctgaatctgtttcacgcacaaatggcaaagacagcatcggcatcaatatcgtcaaagcaaacgatgcgaatacggtagaggttgccgacaatgtcaaagctgagctgaagaagttcaaagaagaccataaaggcttcaattacagcgcaactctcgacatggcggagccgatcacacagtcagttgacacgatgttaagcaaagccatcttcggtgctatttttgcgattgtgattattctcttattcttaagagatatcaaatcaacattaatttctgttgtttcaattccattatcattgctgatcgcactccttgtgctgcagcagcttgatatcacattgaatattatgacgctcggcgcaatgaccgttgccatcggacgtgtagtcgatgactccatcgttgtgatcgagaacatttaccgccgcatgagactcaaagatgagccgctccgcggaaaagccttggttcgtgaagcgacgaaggaaatgtttaaaccgatcatgtcatcgacgattgtgacaattgcggtattcctgccgctcgcacttgtaggcggacaaatcggtgagttgtttattccgtttgccttaacgattgtttttgcgcttgccgcatccctggtgatttcgatcacgcttgtgccgatgctcgcacacagcctgttcaaaaaatcattaaccggtgcgccgattaaagcgaaagaacacaaaccaggcagacttgcaaacatctataaaaaagtattgaactgggcgcttagccacaaatggatcacgtctatcatcgctgttctgatgctccttggaagcttgttcctcgtaccgttaatcggtgccagctacctgccgtctgaggaagaaaaaacgatgcagctcacatacagcccagaaccgggtgaaacgaaaaaagaagccgaaaatgaagctgaaaaagcggaaaaaatcctgcttgaccgcaagcatgtcgatacggttcagtattcattaggctctggcagcccgcttgccggaggagattctaacggtgcgttattctatatcaaatatgaaagcgacacacctgactttgataaagaaaaagataacgttctgaaggaaatccaaaagcaatctgaccgcggagaatggaagtcacaggacttcagctcttcaggcaataacaacgaattaacatactatgtgtatggcgattctgaaaacgatattaaagacacggtcaaagatattgaaaaaatcatgaaggatgaaaaggatctgaaaaacgtaaattcaggcctttccagcacatatgatgagtacacatttgtcgctgaccaagaaaaactaagcaaactcggtttaaccgcgtctcaaatttctcaggccttaatgtcacaaacatcgcaagaaccgcttaccaccgtgaaaaaagacggcaaagagcttgatgtgaacattaagacagaaaaagacgagtataagagtgtgaaagatttagagaataaaaagatcacttccgcgactggccaggaagtcaaaatcggcgatgtggcaaaagtgaaggaaggatcaacatcagataccgtgtcaaaacgtgatggaaaagtctatgcggatgtcacaggtgaggttacatctgacaacgtcacagccgtatcaactgctatccagaagaaaatcgataagcttgaccatcctgataacgtatcgattgacacaggcggcgtatcagcggatatcgctgattccttcacgaagctcggtttagcgatgctggcagcaatagcgatcgtttaccttgtgctcgtgattaccttcggcggagcactagcgccatttgcgattctgttctcattgccgttcacagtcatcggtgccctggtcggactttacgtatcaggtgaaacgatcagtctgaacgccatgatcggtatgctcatgctgatcggtatcgttgtcacgaatgccattgtcttaattgaccgcgtgattcataaggaagcggaaggcctgtctacgagagaagcgctcctggaagccggctctacacgactccgtccgatcctgatgacagccattgcgacaatcggcgccttgattccattagccctcggcttcgaaggcggaagccaggtcatttcaaaaggactcggcgtcacggttatcggcggtttaatcagttcaacgcttctgacgctcttgatcgtgccaatcgtatatgaagtattggcgaagttccgcaagaaaaaaccgggaacggaagaagagtaaaaaaacaaaaagcctcagctatgctggggctttcagcttgttgaaaaaccctcgcattcgttgtcaggtctgcgcgtcggtgctcacgaattctacattcactccgctccaatgctcccccttcctagactacaagggttttcaatcaagctgaaagaatgttaaggatgacaaaagctcaaaacaagaatcagttttgagcttttgtgcgttttcacctgtaagattatgtacattttgttgcgatttttttaactcatagtataattaaaggttgttagtgtaaaaatggatcggatactcttaagtaggatgatgagataatgaaacgtgcacgcataatatacaatccgacttcaggacgggagatctttaaaaagcatcttgcccaggtcctgcaaaaatttgaacaagccggctatgaaacctccacccatgcgacgacatgcgcaggagacgctacacacgctgccaaggaagcggcattgcgtgagtttgacctgatcattgcggcaggcggagacggaacgatcaacgaggtcgtcaacgggcttgcgcctttagacaaccgtccgacactcggtgtgattcctgtcggcacaacgaacgacttcgccagagcgctcggcattccgcgcgaggatattttaaaagcagcagatacggtcattaacggcgttgcccgcccgattgacatcggacaggtcaacggccagtattttatcaatatcgccggaggaggccgcctgacggagctgacgtacgacgtgccaagcaaactcaaaacaatgctcggccagcttgcttattatttaaaaggaatggaaatgctgccttcacttcgtccgacagaagtcgagattgaatatgacggcaagctgtttcaaggtgaaatcatgctgtttttggtcacgctgacaaactccgtcggcgggttcgaaaagctcgcgccggattccagcctgaatgacggcatgtttgatttgatgatactaaagaaagcaaaccttgctgaatttatcagggtcgccacgatggcgcttcgcggcgaacacatcaacgaccagcacattatttatacaaaagcgaaccgcgtgaaagtcaatgtatcagaaaagatgcagctgaacctggacggcgagtacggcggcatgctgccgggcgaattcgtgaatctgtaccggcacattcacgtcgtcatgccgaaggagaaagcggaacagctggatgactaaaacttggctttgtaagccaagctcagaatgttgacaaaatcctaaaacagttttcgttttaggattttgtcatcttttcagcgtgattgaaaacctttgaagtctaggaagggcgagcatcggagcacagcgaatgttgaattcgtgagcaccgaagcacaggactgacaacgaatgcgaaggtttgcctacacgctgaaacttggcttgaataggccaagtttttctttcgcttaaaacaagaggtgaacatacatgaaaatgaaacccccagtagaaaaaaacgaatactatgacgtgacatttgaggatttgacccacgaaggagcgggtgtcgcaaaggtccaaggattcccgatctttgtgccgaacgccctgccggaggaaaaagcccaaatcaaagtcacacgtgtcaaaaaagggttcgccttcggccgtctgattgagctgaaggaagaaagcccgcatagaacggatgccccatgcccgatttacaagcaatgcggaggctgtcagcttcagcacatgacctacgaaggccagctcttgtttaaacagaaacaagtcaaagacgtcttagaacgcatcggcaagctggacctttcaaacgtcaccgtgcacccgacactcggcatggaagacccgtggaactacagaaacaaagcacaggtgccggtaggagaacgggaaggcggactcgtcgcgggattctatcagcaaagaagccatgacatcatcgacatgagcgcctgcctgatccagcaatccaaaaacgacgaagccgttcaagctgtcaaagacatttgcgcaaactacggtgtcaaagcctacaacgaagaacgccacaaaggctggctccgccacatcatggtcagatacggcgttgttacgggcgaaatgatgatcgtcttcatcacaagaacaagcgacttcccgcacaaagcgaagatcatcgaagacatcacagcgcaattcccgcacgtcaaatccatcgtgcaaaacatcaacccaaacaaaacaaacgtcatttttggcaacgaaacaaacgtcatctggggcgaagaatacatctacgacctcattggagacgtcaaattcgccatctccgccagatcgttctatcaggtcaatccggagcaaaccaaagtgctctacgacaaagcgcttgagtacgctgagcttcaaggggaagaaaccgtcatcgacgcctactgcggcatcggaacgatttctttatttctggcaaagcaagcgaaaaaagtgtacggcgtagaaattgtaccggaagcaattgaggatgccaaacgaaacgccgagctcaacggcatcacaaacgctgagttcgcggtcggggaagcggaaactgtgattccaaaatggtatgaagaaggcattacagctgatacgctagtcgtcgacccaccaagaaaaggctgcgacgaagccctcctgcggacgattgtggagatgaaaccgaagcgggtggtgtatgtgtcctgtaatcctggcacgcttgcgagagacctgcgggtggttgaggatggcgggtatcagacgctcgaagtgcagcctgtggatatgtttccgcatacgaatcatgtggagtgttgcgtgttgcttgaaaaaaacatgtgtgagttcgagaaattatagtatatctcggacttccgtcttctttaattcttcgatacactcaattggtttgtgaagaattttttcatcaatagttgggtttgagtgaattgttcaagttgttttagtaaatcatttaaattatctttaagtcggattaaggtctctaatcggagtctctacgcgattttgttttcagataggtatttgtttcaattggataggcttaacaaacaaatttgaaaaaagatcaataagcaacaagtcgaattaccagtcttacagatgtttaatacaatcgaaattgtcccctttgattatcaagggaagttagaggataacatagcagatgctattatgaccattaaaggagcaaataaatcttactttgatgtttgttgattttctttaacgctcattgttctaaagcaaatcttgacaaacggcaaattgtttttggtgttggtcaagatttggattgtctattgtttagaagacaccaataaaaactgcttttaaaaataattaagattgacaaatgaacgacgtagacagctttatgagcaaataaaccaattgtaaaggaaaaaaatcaaatataatcatattgttttcaatgaaaatgaaattacatttactattcccgatatcatagatgtaatcaataggatacaggctgtcataactcaattaaagcaagtgttaataaccgttgatccattggtaagtgaatatgccgaaacttgtgtaaggaagctctctaattagggggctttttgctttaaaaagaatagacatgtatcaattgacaaggaaaaggaaaaagttatatactgtatttaacaaatgttaaatcttctatttaacatagaaataggaggtgtaaaatgcaactcggcgatattgctaatgtaaagacagggcttgtgttaagtaggaaaaaggcagaagttgaatatgatgcgaaagctacatacaagctactttcactcaaaaatattgcggaagatggcatgattgaaaacgattcgtttgaggagtttgtaagtaatgacgatttagacgatcactactttacaaaagaaggtgatgtgctaatgcggttgagccacccacacacagcggttttcattgaaaaacaatatgaagggttgttaattccatcgtatttcgccatcattaaagtagacaaaacaaggttcctacgagagtacattgcatggtatctaaactcatttgaagtaaaaaaagagttggaacgctctcagtcaggtagtcgtatccccagtaccaatcaaaatgtaattaaaacactccctgttgtctggacaactctatcaaagcaaaaagcattaatcgaactttacaagctccatcaaaaagaaaaaatgctttataagagattaattgaggaaaaagacttattattccaagcgatttcacaacaaattttaaaggattcaaaatcggagggaaatattaatgattgaactaacaacacaagacaaaattaacagtgttttatggcaggccgcagatacttttagagggaaaattgattcctcaacatataaagattatattctaacaatgctatttataaagtatttaagtgatacatacaaggagcatttggaagaatatacgaagaaatataatggtgatgaacgacgcattgaacgtgctttatcaagagaacgttttgtacttgatgaacaatctacttttgattatttgtatagcaaaagaaatgatcctaaaattggagaaatcattaacaaagcattggaacgcattgaaaatgaaaacacaggtaaacttcgtggtgtatttcgtaacattgactttaacagtgaatcaatccttgggcaagcgaaagagcgaaatgcaatgttacgatcacttttggaggattttagacatttatctctaagaccatcacagttaggaaatgaagatatagtagggaatgcataccagtacatgattggactttttgcatcggatgcaggtaaaaagggtggcgagttctatacacccgctgaagtatcagaattactggcacgtttagttaaaccgcaagaaaacgaccgtatttatgatccaacatgcggatcaggttcgttgttaataaaagtggctaaacaggttccaagtagaaaagttgctatatacggtcaggaacgtaatggtgcaactcattcattagctcttatgaacatgtacctacatggggttgacgatgctaagattgagtggggcgatacattagcaaatcccttacatttagaggatggaaagttgatgaagttccaagcaatcgttgctaatcctccattttcattagataagtgggctatgggcttcgcaggagaaggaacaaatgacaaaaaatttaaaatggagtcaagttttgatccctatagacgttttgagtggggagtacctccaagttcaaaaggagactatgcatttgttcaacatatgctttattcattagctgaaaatggacgtatggctactattcttccacatggcgtactgttccgaggggcaagtgaagggaaaatacgtcaacaaattattgagatgaacttattggatgcggttattggtttaccagaaggattattttttggaacaagtattcctgcgtgtatcatggtatttaaaaaagaccgaaaacgaaatgatgttctttttattgatgcatctactgaagaacattttgaaaaaggaaaaaatcaaaattaccttcgagaaaaggatattgagagaattgttaggacatatgagaatcgggaaacaattgaaagatactcttatttggcaacaatagatgaaataaaagaaagtgaatttaatctaaatattccaagatatgtggacacttacgaagaagaggaacctgtcgatatgattacagtgaaaaataatatttcgaatataaagaaggaactacaagaagtagagttacaaatggagaagtatttgaaagagcttggattgtaggtgaatatacttgactaaaaataattatgttagaacggcgattggagaattaccttcagattgggaagtagaacttcttgataatatagcagaaagaaaatctggtcatacaccagataagaagatagaagagtattggaacggaaatattccctggatttcattgaaagacttatcacgattaaataaagggtttgtatatgaaacaacggattttacaacaaatgaagggattaagaactcttctgctgttttgttacctcaggggacaatagtcatttcaagggatgctacagttggaaaggttggaattcttgctgaggagatggctacgagtcaacattttatcaattatatttgtggggatagactgaataacgtttatctatactaccatttactatttagaaaccacattttcgaaaggattgctacaggaagcacaattaaaacaattggtttaagtttctttaaaaaactaaaggtagcactacctccaattagggaacaagaaagaattgcttctatcctttctgcttgggacaatacaattgatttaaaagaaaaactaattgattataaaaatgagcagaaacaaggattaatgcaaagattattgacaggagaagtaagattgccagggtttaagggggaatggaaaaaggaaaggattggtaaactcataactgaaagtaaagaaatagcaagtaaaccagatcttaataaaagaataaccgttagacttaatttaaaaggtattcagaaaagagatgtttcatctacagaaaaggaagatgctacaactcaataccttagaaagtcaggacaatttatttacggaaagcaaaatcttcataagggagcttttggcataattcctaaagcgttagaaggttatcaatcttcttcagatattcctgcattcaattttaatgaggaagttgatccttattggtttttttactatttttcaagggagagcttttatacaaacttggagaaaatatcaactggtacaggatcgaaaagaattaacccaaaagatttgtttaaggttaaaatccattttccaccttatacagaacaacaaaaactttcagaagtctttttatgttttgatagagagattagtctacttaaagaagaggtcgaagcattaaaagaacagaaaaaaggtcttatgcaattacttttaacggggaaagtcagagtaagggtataaatcatttactttatttcttcgtttttattaggaggtgtagagatggcaagggagaagagttatgatgaacgttacataagccaagttcctgcaattgaggttcttcgaaggttaggttatcaatatcttgaaccagaagaagccgagcagatgcgtgggaatttgtacaacgtattacttagaaatgttttgcaagaaaagttacggtcatttaattcttatgaatacaaaggggaaatatataagtttagtgactccaatatccaacaagctattcgagatttagatgaaccattaacaaatggtcttgtaaagacaaatgaagcgatttatgaaacgttaatgaaaggaagaacatattctgagtttttacctgatggctcaaaaaagtcatttacaattcaatttattgattggaagaacattgaaaataatgtgtttcatatagtggaagagtttaatgtggaacggatggatggacgtggaaacgttcggcctgatattttactgtttgtaaatggtattccttttgttgtaattgaatgtaagaaagcatccatctcgatggaacaagggataagtcaaatgattcgaaatcagggtaaggattatgttcctcaactgtttaagtttgtacaaatggttatgtctactaacaaaaatgaaactaagtatgcaacatgtaatacaccaaaaaagttttggtctgtatggaaggaagaaaaagaagtatggttagagtcttggttggacaaagctgtagaaagtagattgccaacaacacaggataagaatattatttctctgtttcatcctaagcgtttattagagatcactcaatttttcactctgttcgataaagacgtcaaaaaagtagctcgttatcaacaatattttgctataaaagaaatcattaaaacaattcaagaaagagatgaacatgggaatcgtcaaagtggtgtgatttggcatacacaaggatcaggaaaatcactaacgatggtgatgttagccaaatacattctttctgagttgtttgaatataatccgaaagttgttgttgttacagatcgggttgaattggataaacagattcataagacgttccgtcatacaagattaaaggcaagtagagcaacatcgggcggccatttaattgatctaatcaatgacaacaatgctgatattgtcacaacgttggttcataagttcgatacagcatcttcaaaacaaaaaccaattgagtcaaaggacatttttgttttagtagatgaatctcaccgaacacaatacggagagcttaatataaaaatgaaaaaggttttccctaatgcatgctacttaggttttacaggcacgccgttaatgaaaaaagaaaaaaatacgatgattaaatttggaaagctaattcacacatatacaattgcagatggtgtacgggataaggctattgtcccgttattatatgaaggaaaaatggttgatcaatcggttaatcaaaaggctattgataacagattagagatgattactcgtaatctaaatgacaagcaaaaggaagaagtaatgaaaaagtggagccaatttgaacgaattgcttcctccaaccaaagaataagtatggttgcatttgacataaatgaacatttttttaagaattacaaaacacaaggaagcaactttaaagcgatgttagctacaaatagcaagattgaggctattcgttactttgaatcatttgaagaacttggcgatttgaattgtgctgtagttatttctccacctgaccaacgtgagggacatgaagtggtcgatgtggaatcaaaggacaaagtacagcatttttggaaaagaatgatggatcgttatggaacacctgaagactatgaggatgccataaaagatgaatttattaatggtgatgaaattgacttactcattgtcgttgataaattgctcacaggttttgatgctccgagagctacagtgttgtatgttgataagccaatgaaagaacacactcttctacaagcgatagcgagggtaaaccgtctatatgaaggaaaggattatggctttatagtagattatagagggttattagataaacttgatcaagcaatgcaaatgtactcaggagcagggttagaaaactttgatcctaaggatttagagggagctatacatgatgtcattagtgtaattggttcgttaagacaatttcattctgatttattacaaatatttgctcctattaagaataaacaagatgttgaagagtatgaagtatggttagaagatgaagaacttcgagagagattttatgatgtattaagcaactttgggcggaatcttggtattgcattagaatctgaaaaaattcacaatgctctacggccagaggaacttcaaaagtataagaaagacttgaagtttttccaagagctaagaaaaagtgtgaagctccgctattccgacacaattgatcataaggaatacgaggcaaaaatgcaaaagctaatggataattacatttctgccgaagagattatccgtattacaaatcctgtagatattttaaatgaaaaagcattcgaggaagaattagaacgcctggattcaaaacgtgctaaagctgatgccattcgtactcgtttaacgaaaagtgtaagtgcaaaatgggatgaaaaccctgcattttataaaaagttctctgaacgtattcaagaagctattaaagaatacaaggataaacgaatctccgaagcagagtatctgaatcgaataaaggatataatgaaagattatcgcaaaggtgaatcaaatgacgattatccagaagtgattaaggaaaatcgaaaagcacaagcgttttatggagttgcaaaagaccttatgagcgaagttgcggagatttctgaaagttatggttcggatacactcggagatttagctttaaaaacggataaagtgattaaagaacaccaaaaggttgactggcataataatcttgaaattcacaatcgaattgcacaggacttagatgatcttctctttgattttgcagaagaaaatgggatagaaatagattatgatacaattgataaacttatagagcaaattaaaaccgttgctcttagacgttattaaggttgtgaacagcatggagagacatcaaatccagtacgtaaataaaataattgactttgctattcaacgaaagaatgttaagaatgttaatcttaacattaagcctgatatgacaatagaggtgtctgcacatgatgccgttccgttgaatttcatttatgattttgtgaaaagcaaaggtgcatggattgttaagaatgtaaaaaactttgaaaatgcacaaccaaatagccaaagtgggcgagagtatgtaagtggtgaatcctttaagtaccttggaaaacaatatcgtctacgagtgcaaaatactgaggaagaggaaatagtaaaatacttccgaggatttatctatttattcgttaaagatcccaatgattacgaccgcaaagctaaacttatggatgaatggtatcgtgagaaagcatttatgacatttcaggaatctcttaataagcaacttccattagtacaaaagtacggagttgataaacctaatcttgatttacgtacaatgaaagctcgttggggttccgctttaaccgacaagaatacgattttattaaatacagagctgataaaagcgccaaaattttgtatagattatgtaactttacatgagttaatccattttaagtacaatgaccatagtgaaagattttatgatatgctgtactcattaatgcccgattgggaaaagagaaaagcaattttagatgaagagattgtaaaagacttataagaaaaagaacctctttggcaacttaacaaccagattaatcaacaaaaggcagttcctaattttcatgtggagactgcctttttaatttcttattcggattttattggagaattggtctacaaaattgaggattaattgagaggtgaggtcttggacgaaaatatgtgggaattgtcgttcgcaagtggcaacaaactgcttcacacttcatctgaaatacggtgattcttcataacaggattagatgaacgaggattcgcttgtccaatgtgagtcatcattatctttcattctttcaactaaagacgcgataatagagaaatttttcctaataaaggctatctcgtcactttctgataaaggattttcaataatgaggttatcatcttttacaaatttgcaatctttgctaaccgcttgatgtacacgtaatggttttgcaacacgctgtaggtcgttctcttcttttgggagaagatcatttacaatttggacatgctgtttgctacttatggcagtgaactgtctttgttcatgggtataactctttaaaaaataatgtttattatagtttgataacatgaaattattctcattcggaggaggttttttattggataatacgtataatccttttgataagatgcagtttacatataacaattgtttcctttgtgggagtaaagatgtttcgcaaaaaactttagagcatgtattcccaaagtggttgttaaaaaggtttgagttatggaataagcaaatacaattattaaatggtacattaatttcatataggcaattgaccattccttgttgtaacaaatgtaacaacgaatatttatcacgtattgaaaacaaatttaggagggctgttgacaatggatatgatgcatttttaaatctagatgaagaaaccatctttttgtggtctgcaaaaattttatatggccttttatataagcaattatctttaccatttgataggaagtcaccgcgattgggaaccattacaagtcctgatctattagagaaatataggattctacatttattgttacaaggtgcgaggtataaaactaaatacgaagggaaaccatggtcaatctttattttccagagtcaagaatataaggatgaaagagattttgattatttcgatggattgttttccttagtgttagggattcgtattggaagagttagctttgtaatttgttttgaagatgcgggcatacagaaagtaatgtttgaggattattttagggatttgcaagagatatcattacatccgattcagtttaaggagatcatagcgaaagtacattataagcaaatcttatttagaaaaaatcctttctttatggttgttgaaggaaaagaaaacgatagaactgttttagtgaatcaaccaacaggagacttatttgatgaatgggatttcgaagattattcaaaaattttatcattgttttttaaaccttatggattacatttaaaagatatttatcacccacctggtaaaaccattagttttttatatggagaagaaggggaagttaaacatataccaaaataggtgtattatgaatgacaagataaataaaaaatgtataatttagggaaataagtcatctttgaaggcattgggaagaacccaatgctgtttttcattgttttacttttttgatttagttaatgccttctgctacctattgatataattcacccattttttctgtttccatagaaacctccagttttatttcaaaagctatatcaaatttatagatgtaggtagctaattaaaaattctttatcatcctcgtcttcaggcaaaataccaagagttttgtactcccataatgcaattctttgataccatctaactcagacgccaaaatatcgacattattataatcaagttggaattgactattgctatccaatgccaatgtatggttagtccaaacctgatcattattattttggtgcgcaattcttaatttctcaaaaagttctcggatttcccttaataaagttttgaagatatctttacttacgttgtattgggcaggtatatcttgtgaataaataatttggattattttctggttacttgaagtgaaagagaaccatggtagaatcatttaatacttctacataaagataaatttttgtccattcataaggtatgatgttatttaatttctgattaataagctgatacaaatcttgcatttttttagtttccaatcttttcaccttcaatcgtcgagaaatcttagttatcaaaatagctcagcagagaagggctgagccatttttgatttatagaccgaagtagtttattacaaattctttgtcgtcctcatctttaggcaatatccctaaattttgatatttccaaacatctcgtctttgaaggtcatcaagttcagaggataaaacattatcataattataatcaattgaaaactttccggtgttttctaattttaaagtgagattagtccaaatatcttggttgcctagtttaaattcctcttttagttcttcaaatagcttttgaatttcaattagcagttgatcgtaaatctcttcactcacatcaaagtgttccggtatataatgagaaaataaataatcactgttatttggtgttgtaaaataaaagtatatatctgctgagtcaccaagtatttcagcatataaaacgatcttttcccattgagatggaatcatttcatttagatgttcagcaatcttttgatatagttcacccattttttgagtttccattagattaacctctaactttgaattgttgatggcattatttaatatttaaataatccttaacaaattctttatcctcttcgtcttcggggaaaatacccaagttattgaactcccaaatcatttgtctttcgtattcgtccaaatcagactcaataacatcttcataatcataatcaattgaaaactttccagagctttcaagattcagtgtcaaatttgtccatgcttcgggattattttctttaaattcagtgtgtaactgcttaaacaactcttggaggtctagtagtagttcggtataaatttttttactgacctgaaattgttctggaatgtcgtgagagtatatatattcatcgttttctggtgtttgaaagaaaaaatacacttctctggaaccatctagtatttctgcataaagaacaactttgctccattcggaagggatcatgtcattaatttgttctgctattttttgatatagcacttccatcttttttgtttccactagattaaccccctggtttattttctatagtaacttgtctcgctctacgattacctatcttatattcaacattaaataatacaggtctaagtgaatctccctgataaaccggttctatattaacttttacttgcttaggaggttttccatttaacgcctttgaccacacttgctccattttgtaccatttcccgccgctcctattaatctgagaattcatcggcacgatattgtcgaactggcctgagcctttgaattgggtggcgattaaatggccgccgtcatcgtcaggctttcggtcctggggctttccagcattcgtctgtgcatattggtttcgttttgcttctcccagctgcaagtctgctttgacacttgtaattctaccatagttgtcagtcgtgtatgtgtagccttcttttgttttgtagatgatattgggcttcagcactttctttctgctccatcttgcgaaatgctcgccgtatttgacggttaccggcggtacatgtggtgctggagttcgtcttccgcttgatgacgttccgtatggtttcggaaggatgaccttggcgaatttttgcagtccttctttaagcgtgaccccgttgactgcgttgtaaggaacgcctgccggcactaaatcgtgacggggatgataggggagaatatccgcaagtgtgagatctccgatttgatttaatttggttttgacgtgtttttttgatacttctatgcctgtgtttactttttgtttgatgtgatcaacggtttgttttgagactgttatggctttttgggctgttgcagatttgcttgctgctgttttgacttttgccgtcactttggcggctgtgccagtttttgagacggcgccaacaccttttgtgccgacaactgatgtgacaacagtgcccactgcatatgagacccatcttgctcttgagtaggtgtcaccattcaccatgtctttttcgtatgattcttcgattgctgctgaaatggcttcatacgttttgatcgggtgagccacagctccggtaatcgcttcaacggttcctcccggatctgtgaccatatcccacaggcctacgaccgcgtccttcccggaatcataaaggccgacggcgacccctttgaagcctgcttcaagctcacgcgtgttttcaatttgggtgaagtatctctgctgttctgctgtcagattttcatagccaatcgtctttgccattgagtagaattcatcggcatccgcataatcatagtttttcagtctttctttcagtttttcaatctcgcgttccttcgcttcctctttcttaatcttcaagtaagcctcagtccgcttttcaatgtcgccttttttcttatgtatgtcactctcacggtacgctttggcgttgtagtggatgggtgtggcgtttttgcctttgcctgttgcttcttggagcttttggaagtcggacttgatgaattgttcgtttggttctgacagggcgtattctgtcttcaggtcttcgtccaaggcgtccaatttttccagtgtttttttgcgtttgtcgttggcatcggccagctcgtctttgaaggtttctgttgaaaacaggtcgagcgggaggatgtcgtcgatatcgttcaggatgtctttcatcgcttttttctgttcggacatgatggattttgattttttattggcatttgccagttcgtgctccaggaaggattcttcgatgtatgcgtcagagagggctttgtccttcgcggctccggcgatgctattgaaaaatgcgattttcatgtcgatgtagtcgatccattggtcggtgacgccgacgtggtcgtgatagaaggctttgatgttgctggcgccttttcctgaaaattcgctgtcactgagatcagcgacactttttaacgcttttctcaagttgaccatttgcgttcttagttctttgtactcttttgcacggtctgtcgcttccgaaagcagtgttttcgcttcaaatactttcatgaccatttcccttcttttgttcgctcaatatcaaaattttaccacggggcgggatgagggtgggggtgagaacgtgttttggtggaaaaatgagtcatttggcatgtgtctaagtacacggttttgatatgatgatgatagatcaattaaaaggggaagagctcatttggataaagatttcttaatcataaagatcaaggatattcaaaaaggcgacacgctaacgaaccgcgcctgcgggaactgggatatgaaattgtccagagcaaaagaatgtaaacgggcaattgttgttcggagcggtgtgattttaaatgtttacaagatcgttgacgcttgggaatcagatgaacccgccaagctcactaaaacgaataatagagttcggtttcaattggcagagtgccatgactattcttatatgattggcggtacgctgaaaacgaaaacgcaaaatccggtttcgagtctatccttagaaaccttaatggaactagtaaaataaaaggagcccagcatgtatctctataaagtaaacagccaaaaccaaatcgaagatattcgcgagaaaccgtttaaaaaagaaaaagagattcaggatttatgtgaaatcaatcttcagcggatgttggggctcaggtttgtgaaatctgaattcaggatcagcaatttccgcattgatacgttagcgtttgatgatgagacaaatgctttcgtgattatcgagtataaaaatacgaaaaacttcagtgttgttgaccagggctacgcctacttagcagcaatgctcaatcataaagcagatttcattcttgagtacaatgaaaatcatgatcttccgttaaagcgggatgatgtagactggtcgcagtcgaaggtcatttttatctcacctgtatttacggtgtatcaaaagcaatcgatccattttaaagatctgccaattgaattgtgggagattaaaaggtacgaaaatgatctgatccagttgaatcaaatgaaggctgatggcgtctccgagtcgattaagaccatttcacggcaaagtgagaccattcaagaggtcagcaaagaaattaaagtgttttctgaagaggatcatcttgcagataaaccgtttgacatcatagagctttatcagcagctaaaggaattcatttttaatttggacgatcatatttcaatcaaaccgacaaagctttatattgcgtttacatcaaataagcgaaatttcactgacattcttcttttaaaaagcggacttaagctgtgggtgaatatgaaaaagggagaattgcatgatcccgaggacagaatgcgcgatgtctctgagaccggccactggggaaatggcgactatgaaattttcataaaagatgatgaacacattgaatatatcatgggattgatcaaacaatcctatgagaaaaataagtgagaacttccattgagaagttcttttttattgtggcatgctaaagaagaattcatttcagtccctttcttcttctgtaaaaatgaaatgtacaaactgacaaaagacctataaaatgagaaagctatcatgagagagcagaagggtgagagagacaatgagttataaattagttgcgatgcttttatcgatactattcctattatcggcgtgttctaatagcggatcttctgataaggatcaggaaaagcaagcagtgaagaaagcgagcgttgcgatgctgacggagcaggaagtaaaatcagctttgaaaaacgatattgattcgatctttaatgcatttgataaagcgggaaaagaaaacggctggagcacggcaaacaaggcggatttcaacaagctgcggcctagtgtgctgccttatgcaacagaaacgtttgcagatcagaccttaaaggatttggccggagagtactattgcgagtgtgatgatccttttcaacccggctctgatttcgatgtgcgttttacatatgaacaggacaagaataagatagaggcttcatcaatagacccggcaacagaattaaacaacatgggcacggaatggacgtttgaattgatgaagcaagacggtaattggaagatcaacaaatgggacagcaagtcgcttcaaggggatgatatcaagctgacaaaagaagaagcgaaaacgattctgtctagaaacggtgaaacggcggaatttgtgaagtcctatgaatcgaaggctgccggcggaacagcttatcttttcaatgtgaaaagttcaaatggggaaagacaggcggcgatcagctcaaaggataccagtctggtaagtgataatgaaaacgagactgaagctccggagcaagagacagctcagacgactgcggaaaccgcatcgcctgatacagcggatacacagagcagtgagcagacaacaggaagcacaaaagcagattatgttgccaaattgtcagcgacagaacagaaagaaaagcacaatgactatcaaagtgattatcagatgattgaggattacggttacaattatcaaatgtgggacggattgctgaacgagatatacggcgtgctgcaaaagcagctttctgccccagacatggcggcattaaaagtgaaacagcgccaatggataaaggatagggatgctgcagcccagaagcgatatgatgaggagggcggcggttcattatcccgagtcgtccaaacggaagagcttgccaaacagacgaaagagcgctgttacgagctggtgaatacgtatttgaaataagattgacatgggacccttgcataaagggttcttttttatgaaaaaaacaaattgacaggatgaaaaaacaatttcttccttctatattgttttcaaaatttgggattgatagaatatgacatatctcatagagaaggagggaagccgttgagtcaagccataccgtcttcgcgtgttggtgttaagattaatgaatggtataaaatgattcgccagttcagtgttccggatgctgaggttctgaaagcggaggttgagcaggacattcagcagatggaagaagaccaggatttgctgatctattattctctgatgtgttttcggcaccagctgatgcttgattatttggagccgggacaaacatacgggaatcgccctacagtgacagagcttcttgaaacgatcgagacccctcagaaaaaactcacaggccttttgaaatattactctttgtttttccgcggcatgtatgaatttgatcaaaaagaatatgtggaagcgatcgggtattatcgcgaggcggagaaagaactgccgattgtgtctgatgaaattgagaaagccgaattccattttaaagtggccgaagcgtattatcacatgaagcaaacccatgtgtcgatgcaccatattcttcaggccttggacatttatcaaaaccatcccctatacagcattagaacgatacaaagcttgtttgtgatcgccggcaactatgatgatttcaaacactatgataaagcgctcccgcatttagaggcggcgctagatttggcaatggacattcaaaatgacaggtttatcgccatttctctattgaacatcgcgaacagctatgacagatcaggagacgatcagatggctgtagaacatttccaaaaagcggcgaaagtaagcagagagaaagtgcctgatctgcttccgaaagtcttgtttggattaagctggacattatgtaaagcgggccaaacacagaaggcgtttcagttcatagaggaaggattagaccatatcacagcacgttctcacaaattttataaagaattgtttctgttcttgcaggccgtgtacaaggagactgttgatgaacgaaaaattcatgatcttttaagctatttcgaaaaaaagaacctgcacgcgtacattgaagcatgtgcccggagtgctgccgctgtttttgaaagcagctgtcactttgaacaagctgctaagttttaccggaaagtgctgaaagcccaagaagatattctaaaaggagagtgtttatatgcctattaagaaaaaagtgatgatgtgtctggctgttactttagttttcggaagcatgtcgtacccattcctgacaaactccggcggcgttaaggaatcaacagatcgaaatacgacgtatatcgatcattccccttacaaacttagtgatcagaagaaagcccttagctagggctttttcttgctttacggaagacgttccattttccacatcacggcattccttctatttctaacgcaagacactcgaaacaaccaaaccatttgaggtataatggataaagtgaataacagtatttagattgatatatatgaaagagagtggaacatcatgggccgtaagtggaacaatattaaagagaagaaggcgtctaaggacgcaaatacgagtcgaatttatgcgaagtttggccgtgagatttatgtggcggcgaaacagggcgagcctgatccggaatccaaccaggcgctgaaggttgtgcttgagcgtgcgaagacttacagcgtgccgaaaaacatcattgaacgtgcgatcgagaaggcgaagggcggagcggaagagaattacgatgagcttcgttatgagggcttcgggccgaacggatcaatgattatcgttgatgcgctgacgaataatgtaaaccgtacggcgccggaagtgcgtgcggcgttcgggaaaaacggcggaaacatgggtgtgagcggatctgttgcttacatgtttgacgcgacggctgtaatcggtgtggaaggcaaaacggctgacgaagcgcttgaaatcctgatggaagcggatgttgatgtacgtgacattttagaagaggatgacagcgtgatcgtatatgctgagcctgatcaattccatgcggtgcaagaggcgtttaaaaacgcgggtgtcgaggaatttacagtagcggagctgacaatgcttgcgcaaagtgaagtaacgcttccggatgatgcaaaggaacagtttgaaaaattaattgatgcattagaagatttggaagatgttcagcaggtatatcataacgttgatttaggtgagtaaggagtgagcaggctgttatggcctgctttttttgtcccggaaattgttttagctgtatgtaggcggccgcctatacgatctataagatattctcatactctggactgtaacctatgtgaaggagagagtgaatatgactgatacaagacatatgtatggcggacctggttttggtcattatcagggctttggtattggccacccgggttatggcatgtatggaggccacccgggctttggcatgtatggaggctacccagatcacggcatacatggaggtgtcggcggctatccgggatatggaacgtacggaggatacggaggatccggcggttacccaagcggcggctatggaggctctccgggaactgtaaattatccgaacatgcaccatgaaaatgatggccatcaccactattatcaccatcatcatgatggaaaagataatcttcatcaccatcatcatgatggtcattatggccaccatcaccaccatatgggccactggggaaaagacggttataaataaagaagatgatggtataaagaggacactcttgcagatcaagagtgttttttatcttttttcttgactgttcagtctggaaactggtaacatttgtttcaggaggtgatcgtcttttggggaggaataaagaatttgatacggcacttgttcttcacagggcgatagaggtttttggagagtatggctacgaaggaacgtctcttcaggatctgctctctcatttaggcattgcgcgccagagcttgtatgatacgtatggcacgaagcgtgatttatttttgtccgctgtgaaaacgtatcttgaagggaaaaacactgccgttatggaaaggcttgaagcgccaggatctgtaaaggaagccattcgtgatatttttcaagaaggtgtcaatgctctgagggaccctgaacgggcgaaggcgtgctatatcattaacagcgcgattgaacagattccgcatgaccctgagcttgccctgtattttgaaagacaatccaagcagcttgaggacgctttttatcaggcgcttttaagagcgaaggaccaaggagaattgaatggcgaagatactgatatatctgcgcttgcccggtacctgaatcaaagcaggctgtctctgacatttgttgcgaaagtgacggctgatatggatcggcttcaggaccatgttgacgtgagtttatcagtgcttgattaacatgtggtaaaggattctttgcccatgtatgtatttttcggactgaatagtctagaaataaaaatgaggtgatgatgaatgttgatgaatgaatttgaaaaagcatgtgaaacattgagaaagtttatggcttatatgcttgagaaggacatgaagagctggacggagctttgggatgagaatgctgtatttgagttcccttatgcgccggagggatcaccaaaaagaatagaaggaaaagcggccatttacgattatattaaggattatcctaagcagatccatctttcttcatttaccactccgacagtgtaccgttcagcagactcgaatacggtgattgcggagtttcaatgtgacggccatgtgattgagactggactgccttatcgccaaagctatatcagtgtcatcgaaacgagagacggccgcattgtgcgttatagggattattggaatccgcttgttgtaaaagaggcctttggaggatcatttttgcaaacagaggagagtgggaaatgatgaaacagaatccgattttaatcacgggcgggactggcacagtcggcagccgaatcgccagccgtttaataaagctgggatacagagtgcgtattgcaagccgaaaaaagggcgcgcttgcaagtgcggagtatgtgtattttgattggaaggatgcctccagttttacgcctgctctagaacaggtaaaagacatctatcttgttgctccggttggtgtacttgatccggctccctatgtgcttccctttttaaaggaagcaaagcgtctcggcgcaaagcgggtagtgatgcaaagtgcgtctgttgtctccgagaacggtcccgtgtttggcgcgcttcaccaggcagtgcgcgagtttccagaatggacggtgctgcggccctcatactttatgcaaaatttcatcaatgtccagcaccgcatgtctattcaaacggaggggcgcatcacaacggcttcgggtgaaggaaaacttgggtttattgacgctgatgacatcgcagaaacagccgtcagggctttgattgatgatgttcctcatcaaacacatcatattctgacaggtcccgaggcgctgagctatgccgaagcggcggagatcattggagctgcggcgggacgccgggtggagcatgtcagcatttctcgttccgagctgcagcataaaatggaggcaggaggtttgcccgcggattatgcccattttatggcgaagcttgatgaggcaatcagccatggtgcggaacatcgggtaacggatacagtgaagcatgtgacgggaaaagaacctcgttcgctgtcagagtttgcggctgctcatgctgcatattggaaacactgacctcattttggactgaatagtctagaaagaccttcggcgcttccgaaggtcttcttattgaaaaagctaagtcgtgttttagtcataatcatgcctcctgcctcatacctattaaggtcattgtttttgagaaaggaggagccggaatgaaggatatgcagccgtttacgcctgtcaaatcatatacgccctttcacagccgttttgatccctgtccgcccatagggaagaaatattacagaacgccccctaacctttatatgacctttcagcctgagcatatggagcagttttcgccgatggaggctttgaggaaaggcaccctttggaaggatctctatgatttttatgaaaacccttatcgagggggagacgcacatggcaaaaaaggttgacgccgaatattatcgtcagcttgagcaaatacaggctgctgattttgtgcttgttgagctgagtctttatttaaatacacatcctcatgatgaagatgcgctgaagcaattcaatcaatattccggctattcaaggcacttaaaaagacagttcgaatcctcttacggaccgcttctgcagttcggcaacagccccgcgggcaaggattgggattggggaaaagggccatggccgtggcaagtataaggaggaatgcctgaatgtgggtgtatgaaaagaagctgcaataccctgtcaaggtcagtacgtgcaacccgacgctggcgaagtatttgattgaacagtatggcggagcggacggcgagctggccgcggctctccggtatttgaaccagcgttatacgattcctgataaggtcatcggccttttaacagatatcggtacggaggagtttgcccatttggaaatgattgcgaccatggtctataagttaacaaaagacgccacaccggagcagctgcgtgaagccgggcttggcgatcattacgtcaatcacgacagcgcgcttttttatcataatgcggcgggcgtgccgtttaccgcgagctatatccaagcgaagggcgatccgattgccgatttatacgaagatattgccgcagaagaaaaggcgcgggcgacgtatcaatggctgattgatatttcggatgatcctgatttaaacgattccctgcgttttttgcgtgagcgtgaaatcgtacactctatgcgcttcagagaagcggttgaaattttaaaagaagaacgggataaaaagaagattttctaataggcagattggcctctctttcatacacccttttacatacagagaaaatggtctgtttttgcagtttggtctgcattataatcaagggtgtgtaagcttactttttgattgggaggcctttatgtcagcttttaagattgagaacgaaacgattgcagatggattttacgcgtgtccggccgtctatgaggatgcagaatcgattaccgggttgctcgtccgaacagctgaatggctccgggatcggggttctaaccaatggagcggacttctcaaagggcaagatatacatgatatcacggggtcaattgaaaagggacatgtgtttgtgtttaaaaaagatgaagagcttgcggctgtcgtgatgctgctgcctgcaccgagcgagtgggaccggaagctttggggagacgatgggcatgaggagtccatttatttgcatcgcctcgcagtaagccgccggtttgcgggacaggggcttggagcccgcgtccttcagtgggcggagacgggcatacactttccgggaaaaacacggatccggcttgactgtgtcgctgataacgacgccctgcattccttttatcggcgtatgggatatgaattcatgggtgctgatgcgtccggatatcatttgtttgagaaagagattacggcagaataagcgtcctttgcagggggcttttttgtcttttctaaaagggagggcaggcgatgttgtggccaattttatttgtgacagggattgtgacggcttgtctgtttgctggcgtatccgttttgatgcggatgagatttcctgacaaaagtcggccggaatggatgttggccgggctgatcgtccttggtgtgtttgcgatctggtacagcctcgtgtatgtacgcggctgggaaggggctgcgctcggaatgcttggattcaatgtcattttcggagccattgccggatatttgatcgataaggccatccggcgttacaggaaaagataaggctgctgccgtctctcatcatgtcgaaattttcacagaccggcaggaattttctttcgaaaggagaaatacatattactttaaaatgaaagcgttttccaaagcgggaaggtgatgttgatgatacacagtgtgacaaatgggctgaatcgtttttgtacgtgggtgatgagactggcctatttgaatgtgctttggattttgttttctcttgcaggcctggttgtgtttgggctgatgcccgctactgccgcgatgtttacagtggcgagagaatgggcgaaggggaatacagatgccccggtgttttctgtcttttttcgggcgtttaaaaaggaatggcgggcatcacagatcctcgggcttatcgttgtgacggctgccctgtttctgtttgcggatatgcggatagcggctcagatggaccagcctgtgctcgtcaatgtattcctgagcattagtttgattttcgcgtttgttgtgctgtatgtgttcccggtattttctcattttgacgtaaaaatcagagaggtgctgagcatcagctttttcattgccttcagccgtccggcggtgacgcttttgatggcggcgggcgctgtcggtgtgctttgtctcgttctgtttcatgtcacgtttctattgtttttcagcgggagtttactcagcctgatcttaacgaagctgtcctttaaagcgtttcggtcaatggatcagcggcaggagaaagaaaaggcggcatgaagaaaagagttgctggctggtacaggcggatgaagattaaggataagctgtttgtgtttctatcgttgattatggccgtatcctttctgtttgtatacagcggggtccagtatgcctttcatgtgtatgatgagcagatttaccgcaagtcctcggaggtgcttcggatgtcttctgaaaggatcgaagacgagctgaagaagatagaggatgtgtcatatgaaatcattacggacgaacagattcagcgcatcctgagcatgcaaaatcgcgatgatacgtacgatcagtatcaaatgaagcaggagctgtgggatcagctggcgggatatgccagcgatgaaaagtacatcgattccattcatgtgattgatgcccgcggctcagagtattcagccggaagcagttcttcagatcttttgcagcaggagcaggaagaggtatttaagcgagcgaaagcgaaaaatggaagaaatctttggatgacgctcggcgggtcagatcctgtcctgatttcagcacggcagatcaggtcctatcaccagctgagtttgaacggcttgggcatggtgctgatccaggtcaatgtaaaacagatgattcgtgatgtgccgaaggattggggcgattcagtcggagacattatgattgctgaccaaggcgggaatttggtgtatacggcacatgcatcagcgcatgttcctgaggcagcaaaagagacgctgaagcaccccggttatgacttgataaaaaagaatggcaaacgttactttatttcttatcttcaatcatcctaccaaaattggagctactataacgttatcccctttgatcagatgttcgcgaaaatttcctttatgaaaacagtgatcggcacatgctttctcctctttttctgtgtggttttgcttttcggaaggaaaatcgccaacagcatcacggagccgattgaacagcttgtgaccgcgatgaaatcggtacagcacggcggcattgaagcaggtgtgtcgctttctctgccggaacatacacaggatgaggccggcatgctgaaccgtcattttactgtcatgatgaaacggattaatgagctgatggaagaaaatgtggaaaaacagctcatcattaaagaaaccgaattgaaagcactgcaagcccagatcaatccgcattttttatataacacgctcgagtccatcaattggctggccaaggcgaatcagcaaaagcaaatctcaaaaatggtggaatcgctcggttttcttctgagaaacagcatacatatgaaaaaggatatcgtgaccatacaggaggaggcggacattttacgtcactatatgaccattcagcgatttcgatttgaagagcgcctgaatttcacgttggatattgacgatgaggtgaagcattgcctcattccgaaactgacgctccagccgcttgcggaaaatgcgattcaatacgcgcttgaaccctttacaaggccatgcgccatccggattcaggcgaaaaaggcaaaggaatgtgtctgtattacggtcgaagataacggccctggcatggatggacggattcttgaatcaacgggcggaagaggaatcggactttggaatattcgcgagcgcatcagcctgacattcggagagccatacggcttgcggattcatagtgagcatgaaaaggggacgaggattgtgatcacaataccgtgccgaaatgaggtggtgtgatgtataaaatactgctggctgatgatgagaggattatccttgatggaatggcaggaatcattgagtgggagtcgcttggcgcctcattgatcggtaaagcgcagaacggacatgaagcatatgaaaagattgtacataagcagccgcatatcgtcatcacagacgtcaaaatgcccggcatggacgggcttgagttgatcaaaaaggtgtcagccatcagtccgtcggtgcaatttatcgtcctgtccgggtttggagagtttgagtacgcaaaggaagccatgaaatatggggtgaagcattatttgctgaaaccctgcaatgaacagcagattatcagctcgctggaggaaatcattgctgagctgaagcggcaagatgtgcacaaaaagaaaacagcccatctgaaacacgagctggaccatatccgttcctttgcagccgatcaatacttggaaggcttgatcgcaggtgtagcccagttgtctccgccgccttcacttgccggaaaaaagatccgcctcttgatcttaaaaggggaacaatctattgatgccacaaccagagaggcactcggatcggcactgacagcggtttgcagcagcggagaatggacagtgctcgccgtagaggagaacgccgctgaaaaggcggcggaggtttttgcggaccgcaagatggccatcagtcaggcgggagaactccggcacgcggggcagctgtttcgtgacacagctgaagcgtctggtgacctgcatgggagcgcagtgatttcaaaaatgatcaggcttattgccgacgagctcggaaatccgaatctgtccttaaaatgggcggcgaaggatatgctgtttatgaatcctgattatctcgggaagttatttaagcaggaaacaggcgagaaattttcacaatatgttacacgagtgcgtcttgaacatgcgataaaacagatgaaaatgaggcgggatgcgagtgtatcagaaattgctgaagaaatcgggtttggcgataatccgaagtatttcagtcttgtttttaaaaaatataccggtctgacaccgtcagaattcagaagaaaacagggaggcgcttccgcaggatagccatctctgtttttttgactttcgccactgttttttgagtgtttcgccctatccgaacgctttaaaataaaatgtaagcacttacattaaaaggggggattggtttgaagaagatttgttacgttctgttatcgcttgtctgtgtctttattttcagcgggtgttctgtgggcgaagaggcctcggggaaaaaagaagacattacgctcagaatcgcgtggtggggcgggcagccaaggcatgattatacgacaaaggtaattgaactttacgagaaaaagaatccgcacgtccatattgaagcggaatttgcgaactgggatgactactggaaaaagcttgcgcccatgtctgccgccggccagcttcctgatgtcatccaaatggataccgcttacttagcccaatacggaaagaagaaccagctggaggatttaacgccgtatacaaaggatggaacgattgacgtcagctcaatcgacgagaatatgctgtcgggcggaaaaatcgacaataagctttatggatttacgctaggtgtcaacgtgctgtctgtgattgccaatgaagatttgctgaaaaaagccggtgtgtctatcaatcaggaaaactggacgtgggaggattacgagaagctggcgtatgatcttcaggaaaaagccggtgtctacggttccaacggaatgcatccgcctgatattttcttcccttattatttgcgcacaaagggtgagcgcttttataaagaagacggcactggcctcgcgtatcaagatgatcagctgtttgtcgattactttgaacggcagctgaggctggtgaaagcgaaaacgtccccaacacctgatgaaagcgcacagattaaagggatggaagacgattttatcgtcaaaggcaagtcagcgattacatggaactactccaatcaatatttgggctttgcccggctgacagactcgccgctgtctctctatctgccgccggagcaaatgaaggaaaaggcgctgacattgaagccgagtatgctgttttccattccgaaaagctctgagcataaaaaagaggcagcgaaatttattaatttcttcgtgaataatgaggaagcgaaccagctgattaaaggcgagcgaggcgttccagtctccgacaaggtggcggatgcgattaaaccgaagctgaatgaggaagaagccaacatcgtggagtatgtagaaaccgcgtcaaaaaacatcagcaaagccgatccgccagagcctgtgggaagcgcggaggtcatcaagctgctgaaggatacgtcagatcagattctgtatcagaaggtatcgccggaaaaagccgccaaaacgttccgaaaaaaggccaatgagatattagagaggaataattgacgggaatggggctgacgcaatgaaaaaaagccggagtataagaaaagacaatctggcgggatatgcttttatttctccgtttatcatcgggttcctatgctttacggtgatcccgatgggggcgtccctgtttctgtccttcacgagctatgacttgtttacggcgccgaaatggatcgggctcgacaactttaaggaaatgtttacgggtgacgaaaagtattggcagtctctgaaggtgacgtttacgtatgtgcttgccggggttccgctccgtctcggcttcgcgctttttatcgctgtcattttaaacaatgcagcaaaaggaacggccatttacagaacgctcttttatctgccttcgatcatcggcggaagcgtcgccgtggcgattatgtggcgcaatatttttggcaatgacggggtcatcaatgcgctgctgttttttgtcgggattgaccaaaaaattctttggtaccagaatccgacaagtgcgctgtggacattgattctgctgtccgtctggcagttcgggtcgtcaatgctcatttttctggccgggctgaaaaacattccgtcttcgtatttggaagcggcaagtgtggatggggcaaatcgggtgcagcgtttcttcaagatcacgcttccgatcctcacaccgattattttctttaacctagtgatgcagacgatttctgcttttatgacatttacacctgcctatatcatttcgaagggcgagggcgggccgcttgacgggacacttctctattcgctctatttgttccagcgtgcgtttaactattttcaaatgggctacgcatcggcgatggcgtgggtcatgcttgtcattgtcgggctgattacgctcatattgtttaaaacatcgtcatattgggttcattacgagtcaaaggaggaatgacggatggagccggtcaacgagcctgtcagaaaagccccggtttttgaaagaaaaaaagccgggcgcgtcagtcccaaacgcatactgttccatgtttttacagcaacgctggcggtgttactgctgtacccggttatttggctgtttgtcagctcgtttaaagaaagcgccagtatttttacaacctcacattctctcattcccgacccttttattctcagtaactatgctgaagggtggaagggtatcgcgggacagccgtttctgacgtttattaaaaactcggcgatcattgtcggactgtcaacaatcggtgccgtcctgtcatcggctgtcattgcgtatggatttgcgcgtattccgtttaagggaaaaaaattttggtttgcgtgcatgatggggacgttaatgctgcctcatgaagtgttgatgattccgcagtatattatgtttgcgaaattagactggctgaattcctttaaaccaattgtcgttccgcaatttttcgggcatgcgttttttatatttctgatgatccagtttatccggacgattcccgaggagctggatgaagccgcgcgaatcgacggatgcgggcgctttgcctgcttttggcgaatcattctcccgctgattgcccccgcgcttgcgacgtctgcgattttctccttctattggaagtgggaggagctgattcaaccgcttttgtatttgaataagccggagctttaccctgtttcacttgcgctgaagctttttctcgatacagagtcggcttcgaactggggcgcgatgtttgccatgtcggccgtctcgttattgcctgtgattcttgtattctttttgtttcagaaatatatcgttcagggcatcagtacgaccggattaaaataaaaaggagtgttgcagatggcacagcttatctttgatgaagaaaaggtgacgtcggttattgaccggatcgtgaaacggacatttcagatggattttgcgtgggattggccgggcggcgtcgcgttttacggtgtggcggaggcctatgaagcgacggaaaacgaggaatatatcaatctgttaaaaacgtgggtggatgaacagctggaggatgggctgccgccgctttcgatcaacggagtttccattgggcatacgcttttgttcctccacaaggtgacaggtgatgacgtgtatttggaaacagcggccgagatggcggaatatgtgctgcataaggcgccgcgctttggcgagggtatccttcagcatacggtgaatgcggcagaatacgtattccctgaacaggcatgggcggatacgctgatgatggctgggctgtttatgctgagaatcgggcggatcatggagcgtgaggattattttgaagacggtctgcgccagtttcacggacatgaggatgtgcttcaggaccctgtcacgaatttgtactaccacgcctgggacaacaaagcgcaaaatcatctgtcggggatttattggggcagagcgaacggctgggcggcactcacgatggcaaaggcgctcccccttattgaggtgacacatccttcctttatgatcatcgacggatcgctcagagaccagctgagcgcgcttgtccggcttcaggatgaatcagggctgtggcatacgattttggatgatccggattcttatctggaggtttcggcatcagcgggtattgcttctgctctgatgtcgagcggaaagctgtatacaaaatatgtgcagaaatcgcttgccgccattttggatgcggtggaagaggacggacgggtcagcaaggtatcggccgggacagccgtcatgaaaaatgccgaaggatacaaacaggtgccttacaaacgaatacaaggatgggggcagggacttgcgctgacgtttcttgctgatgttttgaaaacgaaaaaacgcgtgtatcagtaaagacagcggcggggggaaagggatgaaaaaacagcctcaacagaaggaacgggtttctcgctggaagggaaggtatttcaaaagaaactttgtcttcattttgctgattgcctgtattcccggattgctgactggcggcgcaatctactttctttcgatcgacaaggtggagaaagagctgcagagatcgcatgaaacacaggtggcgcgtgaggtcagccgaatggatgagaagctgggagtgcttgaactggcactcacccagatggcctacgattcttcactgatgaacggattggccgagagggatttggagaaagactttacgttctcctatcaattaacgaaaaaactgtttcttttgcgggaccagcagccgctgatcgagcaggcttccatctttctgaacagcccccggccacttgtgctgagccctgaatacagcgctttgacagaacaggaggcgcttcgcaagtatcgctcgctacttgcctcagaccacagcatttattggaaacggtcgggaaatcaagcgatgctgatccagctcattccgggcgcggctgagaaaccgttcggcgcgatcatgctggcggttgatccgaaagaaatggaatcaatcctgcaaagcttgtccccctatcctgatggcagtgcgctgcttttagatcaaaatcaagaggtgctgtttcatgaaggggaaaaagattttaaaaagactttacttcaagagataaaaaaacagcctgctgagaaaggtcatattcagatggaatgggaaggcaaggtgtattctgtctcctttggagaaatgaaccggatgcatcagcaatggacctttgtgtcagcggcgcctctttcagctattacagcgccgatggtgtttttatcaaaagtgatcatcgtgatgctggtcatttgcatcggtttggcggtatgcatgacatggtatgcatcaaaaaaaatctatcgtcccattcagcatttgcttggcttgtttaccggtggagagaagaaagtatggcaggcgtccgggcaggatgaattcaagtggattgaaaagagatggcaggatctatcccttgaaagccggaagctccaagagcagctcctgcggcagacgccccatatgaaaaagagttttttgcagcacctcttgcagggggatttttactatgacaacgaggacagtctcagatctcggatggaggaggccggctggaacatcggcgaaaacgtgtttcatgtgctggatcttcaattgacaggactccgctgtgaaaaaagcatcttctgttgcgatgatgaacagctcgctgtgtttacactgactaatatcgctgaggaattggcggataaacgcgtttttcagctctccatacttgatatcggccggctttctgtcaccgttcttgtgatgaaaacaaacagctctgatctgaaggcgtatataacggagctggcacgccaatttggagatgtaaccggactatgcctgacctcgacattgagcagcaagacggagcgtgtcacggaaattccttctttatttcaggatgtgaaatgcggcaaatcccgcaggaagtttgctaaccgggatcaggtcattgatttgcaggccgacttccctcaggatgagcagttcgctccttattacccttttgagctggaaaaacaaattgttcaggccatccggctggaaagaaaacaggaagccgaggaactgatagatggatgtatgagggaactggcggaaaaggcggccatagacaggcatgtgcattccgccctgattcagctgttttcccgcattcaggaggatattttgcattccgggctcaatcctagcgaactgtttcagcatcggaacccgtttcttgatatttcagaattgcgcgaacctaatgaagcggcggcctggctgatggatgtagtggtgacgccttacctttccaagcttgagggcagaaaaaacagacagcaaaagcagctggcagaacgtgtgattgcgatgattcacgaacagtatatggcggatatttcattggaaagctgtgccgatgcgcttggcatgaattcatatacgttaagcaaggcatttaagcaagtgaccggcattaattttatcgattatgtgacccagatcagaatcgaaaaggcgaaagaattgctggtcaatacgaataaaaaaattcatgacgtgtcagaagaagtcggttaccgccacaattactttaaccggatttttaaaaaacaggtcggcatgccgccgggtgtcttcaggcaaatgtatcaggaaacgccgtgaaaggagagaacatgtgatgaagaaaccgattcaagtatttttagcgggagattccactgtgagtgactgcccgcctcatgaagcgccgatggcggggtgggggcaggtattcgggcaattgttttctgaagaggtagtggtgcacaatcatgccaaaggaggagcgagcaccaattcttttgtggaggaaggaaggcttcaagcaattgccgaacgcatcacacaaggcgattatctgttgattcaattcggccacaatgaccaaaaaccgcgggggacgaagccgtactccacgtttcagcaatttctcaccctgtttgcagatacggcacgcgaaaagggcgcgcatcctgtgttcgtcacatcggtgcagcgccgccgcttcgatgaaaacggacgaatcgagcattccctcggtgagtatcccgatgcgatgaaagcactggcgaaggagctcgatgtacctgtgattgatctgcttgcgaaaacaaaggtgctgtatgaagcatacgggccggaggagtcgaagcgattgttcgtttggtttcagccgaatgaacatccgaattacccggacggcattgaggacaatacgcatttttcggaagaaggtgcaatggaggttgcgaagcttgtggcagaaggccttgaagagatcggacttccgcttaaggaccaccttgtgagccgggagggaaaagaacatgtataaggaaggcacttgcttgtaccgcaatccgctccggtctaaaagcgatgtgaaggactggcggatggagggaggcgggcagatctcatttgacgatcacagcttgcacctgtcacatgtccaggatgaagcgcactttgtcttttggtgtccggaaacctttccagacggcatcattgtgacatgggatttctctccgattgagcagcctggactgtgtatgctgtttttttctgctgcgggaatgggaggcgaggatttgtttgatccaagtctccagaaaagaacgggaaaataccccgagtatcattcgggggacatcaatgcgctccacctgtcgtatttccgcagaaaatacgcggaggaaagagcgttccgcacctgcaatttaagaaaaagccgcggtttccacctcgccgcaatgggggccgatccgctgccttctccagacgacgctgattctccgtatcgtatgaagctgatcaaagacaaaggctatgtgcacttttcaatcaatggtctgcccattcttgagtggatggacgacggcagcacatatgggcctgtgttaacaaaaggaaaaatcgggttccggcagatggcccccatgaaagcagcttacagggattttgtcgtgcatcaagcggtgagaagatgaagacgactgtaacggatgcgctttatgcaggctgcgaagcggtggtgaaaatagcatggctcaacgggctgtggctgttgtttacacttttgggcggcgttcttttcggatgggcgccgagcacagccgcgatgtgtgccgttataaggaaatggctgatggggcaaaaggatgtcccgatatttccgttatttctcgatacctataaaaaagagtttctcaaggttaatgcgatcggattggcgttttgggctcttttgctcatattgtccgcgaactatcattatttttctgccagtacggattggctgtcctttgccgtaacaagctgcacgctgcttgcagggcttttgtatatcatcgcgctgatgtatgtgtttcccctttatgtgcattaccagctcccgcttcgcaaatatataccgcaggcactgctatttggcgccatgaggccgctgacaactggctgtatgctgatcgggtgcggatttgtcctttatttgctttatacgcttcctggcctgatcccattttacggcccgtgtttatttgggcttgtgttgatgttttttgctcttaggggatttcaaaagacggaggcccagcaccatcaagccgggtaacaaaaaaatgacaaatacgcaaaaaagtgcagtgtccgaaataggcagatgcaaaaaagtgaaattgaagacagctcacacagcgcataaaatccaatttaagtaagcgcttacaaataaatgagaaggagctgtctgatgattacacgaaggaaacgcatgtttaccgctgttacgttgctggtcttgttggtgatgggaacctctgtatgtcctgtgaaagctgaaggggcagcgcggcagatggaagcgctgaaccgggggcttgtagcggtcaagacggacgggggcatttttgtcagctggcggtttcttggaactgaaaacgcatctgttttgttcaatgtgtacagagacgggcaaaaactgaatgctgcgcctgtcaaaaccacgaactatgtggataaaaacggttcggcgggctcaacgtatacggttcgggctgttgtaaacggtaccgaacagccggcttctgaaaaagcctccgtatgggcgcagccgtatcattccgtcccgctggataaaccggctggcggcacgacgccaaagggtgaagcttacacgtacagcgctaatgacgcaagtgttggcgatgtggatggtgacgggcaatacgagctgattctgaaatgggacccgtctaactcaaaagacaattcacaggatggctatacgggtgacgtgctggttgacgcgtataaactggatggcacaaagttatggcggatcaatctcggcaaaaacatcagagcgggcgcgcactacacccagtttatggtgtatgaccttgatggtgacggaaaagcggaagtggcaatgaaaacggcagacgggacaaaagacggcacgggaaaagtaattggaaatgccaatgctgattacagaaatgaacaggggcgtgtgctttcaggccctgaatatctcactgtgtttcaaggttcaaccgggaaagagcttgtcaccgcaaattttgaaccggcgcgcggcaatgtgtcggattggggagacagctacggcaaccgtgttgaccgttttctcgccggcattgcctaccttgatggacagcggccgagcctgatcatgaccagagggtattacgctaaaaccatgctagttgcctataacttcagggatggaaagctgtcaaagctttggacgctggactcctcaaagtcaggaaatgaagcgtttgccggacaggggaatcacaacctgagcatcgcggacgttgacggggatggaaaagatgagattattttcggctcaatggctgttgatcatgacgggaaaggcatgtactcgaccggcttaggccatggggatgccctccatacaggagatcttgatccgggccggccggggcttgaggtgtttcaagttcatgaggacaaaaatgcaaaatacggcttatctttccgggatgctgcaaccggaaaaatcctttggggcgtttatgccggcaaggatgtaggccggggaatggctgctgatattgacccgcgttatccgggacaggaagtgtgggcaaacggttctctctactcagcgaaaggagtcaaaatcggaagcggggctccgtcctcgaccaacttcggcatctggtgggacggcgatctgctgcgggaacagctggacagcaaccgaattgataagtgggattatcaaaacggcgtatcgaaaaatgtgctgactgcatcaggcgcagcggctaacaacggcacaaaagcaacaccaacgcttcaggctgatctgctcggtgactggcgcgaggaagtggtgtggagaacggaggacagcagtgcactgcgcatttacacgacgaccattccgactgagcacaggctgtatacgctgatacacgatccggtgtaccggcttggcatcgcctggcaaaatgtcgcctataaccagccgccgcacacaagcttctttttaggagacggcatggcggaacagccaaaaccaaatatgtatacgccttaactgaaagggggaaggaacgggctgcgcgcagcccgttcccattaaaatgaaaccaaaaaagaggcaaatggaatacctgaccagaggtttgattgcggtaaagacagaacagggcgtgtttgtcagctggcgttttctcggcacggatcatgagacgacggcttttcacctttatcgggatggaaagcggatcacccgcgatccaatcgatgaaagcactaattttctcgatcaaaatggaacggctgactctgtttatcaagtggcggctgtcaataaaggacgggaagaaaagctttccaaggaagctcgtgtttggcaggaaaatgtcctggaggttccgcttgccaaaccggaaggcggtgtggcgccggacggaaagccgtacacttacagcgccaatgatgccagtgtcggggatatagacggggatggagaatatgaaatgatcctgaagtgggacccatccaattcaaaagacaacgctcatgacggttataccggggaggtgctcatagatgcctataaactggacggcacctttttgtggcgcatcaacctcggcagaaacatcagagcgggcgctcattacacgcaatttatggtgtatgaccttgacggtgacggaaaagcagaaatcgccatgaaaacagctgacggcacaacagacgggaaaggacatatcatcggtgatgagcatgccgattttagaaatgaacagggaaggattctgtccggaccggaatatttgacggtgtttaaaggagaaaccggtgaggcgctcacgaccgtggaatatgaaccgccccgcggcaaactggaggattggggagacggctatggaaatcggatggaccgttttctcgccgggatcgcttatttggatggggagcggccgagcctcgtgatggcgcggggctattatacgagagccgttctcgtagcatacgatttcagaaacggaaggctcaaaaaacgctggctatttgactccaaccagcagggccatgaagcgtacgcaggacaggggaaccacagcttgagcgtggcagacgttgacggagacggaaaagatgaaatcatatacggcgcaatggctgtcgatcatgacggaaccggcctgtactcaacggggctcgggcacggagacgcgatgcatgtaggggatctggacccgtcacgaaaagggcttgaagtgtttcaggtgcatgaggacgccacgaagccgtacggactgtcactgcgagatgccggaaccggtgagatattatggggcgtccatgctggaactgacgttggccggggcatggcagctcatattgatccaagctacaaagggtcgctcgtctggggaattgatccgccgggcaatgatggcatgtcgtatgggcttttcacgagcaaaggcgaaaaaatcagcgacaaagcgcccgcttcagccaatttcgccatctggtgggacggtgatttggtcagagaactgcttgatcatgactgggacggaacgattggcaggccaaagattgaaaaatgggatgctgaaaacggctgtctgaagacgatatttcagccggccggcgtgctgtccaacaacggcacgaaaggaaacccggttcttcaggccaacctgttcggagactggcgggaagaagtgatatggagaacggaagacagcagcgcgctccgtatctatacaacgacacatctcacccgccaccgcttttacacgctgatgcatgatccggtttacaggctcggcatcgcctggcagaataccgcctacaaccagccgccgcacacgagcttttacctcggaacgggaatgaaaaaaccgccgaagcccgccctgtacatagcgggaagtaaagcggaggcgccgctgtaggaggactaagggataagacgcaaaggctgaacgctacgacaagatgattaacgaacgggcaggacgaaccaatgctcaagcgctgtacgcaccggtctttttcaagggaagagctatccgtgatggaagctgtataaaaaacgaggaggaatgaaaaaatggcaaatcatatttatcttgccggcgattcgactgttcaaacgtatggagacagcacaaatcaagggggctgggggcagtttctcggctcgcatctgccggagcatattcaagtgatcaacagagcgatcgggggaagaagctcgaaaacatttgtggaagagggcaggcttcaggcaatcctcgatgtgattgagccggatgattggctgttcgtgcagatgggccataatgacgcgtcaaaaaataagccggagcgctacaccgagccctatactacttataaacaatatttaaagcagtatatcgcaggcgcgcgggaaaaaggcgcccatccgcttctcattacccccgtagcccgctttcattacgaaaacggcgtgtttttgaacgattttcctgattactgcattgccatgaagcagacggctgaagaggagaatgtccagctcattgatctgatggagaaaagtctcgctttctttactgagaagggcgaggaaaaagtgtacacctattttatgatttcagaagggattaacgattacacgcattttacaaaaaaaggcgcaaatgaaatggcgaaacttgtggcaaaaggcataaaggagctcggcctgccattgacagaatcgatcatcaaagaaaggtgaaaatgggatgagaaaactgtatcatggcgcttgctattatccggaattatgggatgaagagacgattcagcaggacattgacatcatgcgtgaagttggcgtaaatgttgtgcggatcggcgaatttgcctggtctgtcatggaacctgaagaaggaaaaattgacgtcggttttttcaaagaaatcatcgcccggctgtatgatagcgggatcgaaacgattatgtgcacgccgacgcctaccccgccgatttggttctcacatggccggcccgaacgcatgcatgccaatgaaaaaagagagatcatggggcatggctcccgtcagcatgcctgtacgaacaacccgtatttccgaaaaaaagccgccatcatcaccacagccatcgccaaggagcttggccggctcccggggctgatcggatggcagctagacaatgagtttaaatgccatgttgcagaatgcatgtgtgagacatgcttgcgcctatggcatgactggctcaaaaatcgctacggggtaattgagcgcttgaatgaagcttggggaaccgatgtgtggagcgagacctatcagacgtttgagcaagtcccgcagccgggaccggccccgtttctgcatcatgcctctctacgcactatgtatcagctgttttcgatggagatgatcgcttcgtttgcggatgaacaggccaaaatcatccgctgctattcagatgcgccgatcacgcataacggatcagtcatgttcagcgtggacaatgagcgaatgtttcagaatctggattttgcctcctatgacacgtacgcttcgcaggaaaacgcctctgcctttttattgaactgtgatttatggagaaatctgaaacaagggcgcccgttttggattttggaaacgagtccgtcgtatgccgcctcgcttgaaagctccgcttacccgcacgcagacgggtatttgcaggccgaagccgtatcgtcctacgccttagggagccaggggttttgctactggctatggcgacagcaacgttcaggcagcgagatttcccacggttcggttctcagtgcctggggcgaacccaccatcggctatcaaaaggtgctggcggttgagcgggcaagaaaggaaatcgagcctattattctatcgactgaacccgttcaagccgaggcggcgatgacttactctgacagagcaaaagcatttattaaaactgagcctcaccggggactccggcatcgttcgcttgtgacgcatttttatgaacgtattctcaacacggggattcaccgtgaccttattccggaaggcgctccactggacggctatcgcttgctgtttacgccatttgtgccgtatttgtcttctgaatttatcaaaaaagcttcggcattcgctgaagcgggcggcatctggatcaccgggccgctgacaggagggcgcacatgcgagcataccattcataccgattgcggacttggcgaacttgagaaaacgtcagggatcaaaacactttttacctttccgatgaatgagaacgtgaatacaggaaaagcgtttggcatcacggcgccactcggactatggagcgcggtgtttgacacagagagcggaaacacccttggcacggttgaatcaggaccgggggcgggccatgcttttctgacggaacagaattacggcgaggggaaaattgtcatgctgggatcgcttccatccgggaaagaaggggatgcgatgctggaagcgctcgtcaggcattatgcggaggaagctgttatttccagccggtcggatgtgacgcccggcacgatcgttgccccgcgcaaaggcgaaaacggccttgtgtggatcgttgtgaatatggatggaaaaggaggaagtgtgacactgccggaagcgggaacagatctgttgacgcaccgcttggaaaaggcggggaggctggcggtcggaccgcatgaataccgtgtgattcaatttgacaatcacagctgattctttgcatcgaatcagcttttttctatggagggagagaccgatgaaaaagatcaaatggttatcaggacagccaaaggtgataagtggtgtgacgtggggcgtgccatggaaaaaaggagaattaaaaaagggtgaccgtctggcgcttatgaatgaaaacgcggaaatgcgatatgtgcaaagcgaaccgttggcctattggccggatgggagcatcaagtggacgaagcacgcggcggtgtttggtggtcagagaaaccaaatatttacagttcgcaaaagagaagtgccgcagccaactgaatcgctcagcattcatgagacagagcatgatatccaagtgaatacaggagcactcgtttgtaccattcataaaaaaggatctgatttcattcaatcattgcagatcaatggaaagccgatcgccgcaggcgggaggctcgttgcgataagagaaacgagaaaggagtcggcggcggaaacggttcttttgcatgaaaggtctgtcagctttatcaaacgggcggcgattgagcagagtggtcctgtcaaagcagtagtcaaaatcgagggagtgcatgtgctccataaaacgtatgaggaatggctgccgtttgtcatccgattaacgttttatgccgggctgtctgagatcggccttgtgcacacgcagctgattgacaggagcggtaaacaagaattcataaaggggctcggcatcgaattcgacctttttttggagggagagccgtacaaccgccatttccgctttgcgggagagaaagggatgtacaaagaacccgcccagctgtttggcacacgtaaattcaatgaacgatatccgctttatgaaaaacaaatcaatggcgaaatgctgtctccagatgaagagcataaggaatggtttgcacatggcacacagaatgtggtttgggacgatgtcaagcttgtgcaagattccagcgatcattacagcctgtcaaaacggaccggaaaagattatgcgtgggttggaatgctgcatggcagccgggcgaaggggctctgctatgcgggcggaaaaaatggcggtgtggctctcggcctgcggtatttctttgagaaatatccttcagcactggaaatcacaggtcttgccggcagccgccccaaaatgactatctggctttggcctccggacggcgaagcgatggatttgcggcattatacaggaaacacccacgtggccagcgcgtatgaaggatttgatgaaatgcgctctgatccgacaggcattgcgaacacaaatgaaatcagcctggcgtgcttttcgcacatgccgtctgacgaagtccttaatgcactcgctgacaaatggcaggcgccgccgctcttgatatgtgagccaaacgtctattacgaatcaaaagcgctcggggtttggagcatcattgacacatcccatccgctcaaaaaagagctggaggaacagcttgacgccgcctttctgttttataaaaaggaagtagagcagcgcaaatggtacggtttttggcattatggcgatgtcatgcatacgtatgacccgatccggcatatgtggcggtacgatctcggcggatacgcatggcaaaacaatgagctcgttccgaccttatggctgtggcaggcgtttttccgctcaggcagagaggatatctttcgcatggcagaagccatgacccgccatacgagcgaaacggacagctttcacctcggtgaatacgcaggacttggttcacggcataacgttgtgcactgggggtgcggctgcaaggaagcgagaatcagcatggccgggctttataaattctattattatctgacgggtgatgagcggacgggagatcttttgacagaagtgaaggatgccgattatgccctcgtcaaaaccgatccgatgcgcgctttttacgagaaaggcaagcacccgactcacgccagaacgggaccggactgggcggcgttttgctcgaattggctggcggaatgggagcggaccgaaaatccggaatatctccacaaaatccaaacgggaatcaactgtctgaagcggctgccgctccgcttattatccggcccgacatttgaatatgacccggcgacctcgatgcttcatcacatgggagacggcattgcgggcggatatcatatgatcattgccttcggcgcgccgcaagtgtggatggagctggctgagcttcttgatgaccgggaatgggaggatatgctgagtgaattcggcgaattttacacactcagtgatgaggaaaaacgaaaaaaaagcggaggcgctcttcatgacgggcattttcactggccgatgttcgccgccagtatgacagcctacgccgcaagaaaaaaacaagatcctcatctcgccgccaaagcgtggaatcttttgctagaagataagctcagccatacgccgcttccgatcaaaccggagcgcatcgagacatggacgcagctagaggagcttccatgggtgacaacgaacactgtctctcaatggtgtttaaatgtcatagcggcgctggaactgatcggagattcccttccggcaaaaaaagaaacatcgggcaaaaaaggataacagccggaatttcataggagaaatggtgcaaaaaatgaagattgcaagaatttatgtaagcgctttatattgagaggggcaaaggggaaatgcaaattgaaaaaagggggacttacgcaacatgaaaataagaatgcgaaagaaatggatggccttgccgcttgctgccatgatgatcgccggatgcagccattcggaaacatccaattcagcaagcggttcgaaagatacgatcaaaattatggcgccgcttttatcgccggaaagcccgagtgataagagcccttcattaaaagcactcgaaaaatacacaggcaaagagattaaggtcacatgggtgcctgattcatcctacaacgacaaattcaacatcgtcatggcttcaggagagatgcctcacgcgattgtcattaaagataagtcagccggctttatcaaatctgtcaaagcaggggcgttttgggagctgtctccttatttaaaagactacaagaatttaagccaggcagatgaaaagattttgaagaacagctcggtgaacggcgaggtgtacggaatctacagaacgagggatctgatcagggcgtgtatgatcatcagaaccgactggctgaaaaatgtcggtctgaatatgccggaaacgcttgatgatttctatgaagtgctgaaagcctttaaggaaaaagatcctgacggaaacggcaaggatgatacgtacggcatggtcgtgccgaaatggatgggactcggcaacggaagcccatgggatgttctgcaaatctggttcggcgctccgaaccgctacggtgttgaaaacggaaagctgattccggattttacaacgaaggaatacatggatgcgctcacgttttttaaaaagctctatgatgagggattgatcaataaggactttgctgtcatggattctgcgaagtggaatgatccggttgtaaaaggaaaagcgggtgtcatcgttgatacaggctcaagagcgtctcaaatccaaagcgcgatggaggaggcggatgagtcgaacaaggatatcattgatatcgtcggctcgcttgagggaccgaatggcaagcgcaccttcccgacatctggttattcaggcatgatcgcgataccaaaatcaagcgtcaaaaccgaaaaagagctgaaagaggtgctgtccttcctcgataagatgaatgataaggaagcgcagattctcacgaacaacggagtgaagggccgcaattacgagctcaaggacggcgtattcacctcacttgaaaaaaacaacaaatctctcctgtatgagcatgaaggcttggcacagttcagcatgtcgattccaaaaagcgagtattacatcgaagaccagaaaaccaagctcttccagcatcgcaaggacatcataaccgaaggagaaaaaatagccgtctttaacccggctgagtcgcttgtatctgatgtctatacccaaaaaggagcccagcttgacaacatcatcctcgacgcgagaacacaatttatcattggagaaattgatgaaaaagggttcgatgatgcggtggagctttggaaaaaaagcggcggcaatgaactgatgaaggacttgaacaaattgtaccaatcgtcaaaataaaccgatgcgcctgccgttcggcgggcgccccggtatcacgaaaggagaacagatatggaaacagtgccgaagaagggagatgcacctgttctcaccgctggaaaaggcatcagctggatggctgcgctcaaacgggacaaatggctttatcttcttcttattcccggtctgctttatttcttgattttcaaatacttgccgatgtggggtgtgctgatcgcttttaaagactattcgccatatctcggcttctggaaaagcgaatgggtcggctttgattatttcaaagacttttttatgaatccggattttttccggctgctgcgcaacaccctcatgctggcgagtctggatcttttgtttgcctttcccgcgcctctcattttggccctgcttttgaatgaggtaagaaaggctgtgtataaaagatgtatccaaacctttatttacgtaccccattttgtatcatggacaattgtggtcagcatcaccttcgttttttttactgtcgatacaggtgtgatcaacaaaatgatcatgagcctgacaggtgagcagatttctttcttgtcggatgcagactggttccggccgatgattgtgatgcaaagcatttggaaagagacaggctggggaacgattctatttttggcagcgcttgctacggttgatcaagagcagtatgaagcggccatcatggacggagcggggcggttcaggagaatgtggcatattacgctgccggcgataagaagcaccattatcgttttgttgattttaagaatcggcagctttttgaatcttggctttgaacaggtgtatttgatgacgaactcactcaaccgcagtgtggctgacatcttcgacacgtatgtgtacatgatggggattacccaaggggcgtatagctacagcacggcggtcggtttgtttaaatcagttgtcgggattatcttgatttttggcgccaattacattgcgaaaaagtttgatcaggaaggattgttttagaggagggagaggtatggctgaaattcacacgatgcacaacaccaaagccggacgggtgtttgacgtctgcaacattctgtttctcggcggtgtcggcgcgattaccattttgccgtttttatatattatcgccggttcctttgcgacagaagcggaacttgcccagcggagcttctttattttcccgaaaacctttacacttgatgcttacaagtatgtgttttcgacaccgacgttccttcgaagcatgggcgtgtccatcttcatcacggtggttgggacggctgtacagctatttttcaccttcacgatggcgtatccgctggcgaagcggcatgtgaagggacggaatctgctgttgaatctggtgattttctccatgctgttttcaggcggcatgattccgacgtaccttgtcgtaaaatcacttggccttttggatacgtattgggcattgattctgccgatggcgattaatccgttcaaccttattattatcaaaaacttctttcagcagctgccgcgcgagctggaggaatcagcaaaaattgacggctgttccgaaatcggcgtcttctggcggatcgccctgccactgtcaaagccggttatagcgacctttgcgctgttttatgcggtcgggatttggaatgatttcttccacgctctcttatatatcaatgacagtgcaaaatggccgctgcaaatggtgcttcgccaagtcacgattttatcggatttaacggcgaccaatggcgatacgatgcaaaatgccgttccgccggagcagggaattaaactcgctgtcattgtcattgcaacgctgccgattttggcggtctatccatttttacaaaaacactttgcaaagtggatgctgatcggttcggtgaaaggctgagaaagggagtgtttcatatcagtacattagatcggattaagattgcctatatcggcggggggtcccaaggctgggccagaagcctgatgagtgatttgtcgattgatgaacggatgtcaggcacggtggcgctctatgatcttgattttgaagccgctcagaaaaatgaagtgatcggcaatcacagcgggaacggcagatggagatatgaggctgtttctactttgaaaaaggcgttatcagccgcggatatcgtcattatttccattttgccgggatcactggatgatatggaagtcgatgtccacttgcctgagcgctgcggtatttatcagtctgtaggtgatactgtcgggcctggagggatcatcaggggcttgcgtgctgtgccgatatttgcggaaattgcccgggcaataagagactacgcacctgaatcatgggtcattaattatacaaacccgatgtctgtctgtacaagagtgctgtataaagtgtttcccggcatcaaagcgattggctgctgccacgaggtattcgggacgcaaaagttattggcggaaatggtcacggaaaggctggggattgaggtgccgcggcgtgaggatatccgcgttaatgtgctcggcattaaccattttacatggatcacaaaagcctcttaccgccatattgacctgctgcctatattccgtgaattcagcgcgcactatggggaatcaggaggatatgagctggagggggaaagctggagggacagcgtcttttgttcggcacaccgtgttgcgtttgatttatttgaaacgtatggcgccatccctgctgcgggagacaggcatctggcagagtttcttcccggcccatacctcaaacagcctgaagtatggaaatttcatctcacacctatatcattcagaaaacaagacagagctgagaaacgacaagaaacagaacggttgatcgtgcaacaacgaggcgttgctgagaaagcttcgggagaagaaggcgtgaatatcatagtggctcttctcggattgggtgaactcgtcacaaatgtaaatatgccgaatcaaggccaggtctcaaaccttcctatacaagccattgtcgaaacaaacgcattcatcacaaggaaccgtgtccagccgattttgtccggagcgcttccgaaaggtgtggaaatgctggcggctaggcatatatccaatcaggaggcagtggcggaagcaggtttaacaaaggacactggcctcgcgtttcaagccttcctcaatgacccgcttgtcaagattgaccgcagtgatgcagagcagcttttcaatgacatgctccaatgcatcatgcaacgttgagcggagtttttccggtttagaaaggaaagcattgaccatactgatagtattatcaagaagtaggtgctatcaatatgggaaattatttaagcgttgcggtagaactggtctgcggtttaggcattttatttatcatcttaaagcttctcgggaaaacccaattttctcaaattacgccgtttgactttatctctgctttaattttaggagaattagtcggaaatgccgtttacgatcatgaaatcaaaatcaaagaaattatttttgcttcgctattgtggggcgtgctgatttatattattgaatttatcacgcaaaaaatgaaatcatcgcgaaagttcttggagggcgagccgaatatcgtcatccgcaaaggggagcttcaatataaagtattgaagaaaaataagatggacattaaccagctgcaaagccttttgaggcaagcggggagcttttcgattcaagaagtagaatatgcgattttggaaacaaacgggatggtcagtgtgcttccaaaatccgactttgacaaaccgaccaataaggatttgcaggttccttcgaagtctgtttccctgccaatcacgttaatcatagatggagagcttgtccgggataatctgaaggaagcaggtgtggatgaacagtggctgaagcaagaattgaaaaagaagaacattgataagacggaggacgtgttatttgcagaatggcataaaaataagccgctgtataccgtaacatacgaacaaagcagatcaacatgactcttagaaaaaagcttgcagcaaggcgcaagctttttattgattgtatgtcccttgtttgacagcacgtacatggtacatgctcacttcagtgctgatcagatagtcaggctttggtttgcctttgtttgctttgtggccggcgatatgcgcatcgcttttttcccattgcttccagcgatcctctgattcccagcgaatcatgacaacaacttcctcatcaccgcggcgtacgtttttctcaagcactgtcacatcaattaaaccttcttgtttttcaatgattccttcagcgctgaaacgttctatgactttatctgcaaagccttcttttaccgtcatttttctcaactgaacaaacattcgtctcactccaatcattctcacatatgaataattgtaaatgaaattcattctcattgtcaaagaaagcgcagggcggaatcgaaccgccgtgcgcaacagtttattcttttaataaaaacacatttccgtcttcgtccttaaattgaacgaaggtgccccactccatttgattgggctcaccgagaaattctacaccgtttgtcttcattttctcgtatgtaccaaagatgtcttcgcattcaaacacaatagaagccttcatttgctctgagcctttcatcatggctttcgggtaaatgactaaacgagtctcggctccttttggcgcaacctccagccagcttgcttcaggtcccattgggtggtccgctgcaatatcaaagcctaccttctctgtccaaaattgcttcgctttctgctggtcctcgacatatacagcaacagtgccaatttgtttgatcatagggaaacctccaagttgaaaagataataatactataacctgtttacggccgaagtaacataaaaaaatcagccgggaaaccggctgatttttaaaatgagcagctgacaacatcgatgtgatttgtgtctaaggcgaaataaacccagcggcgccgtgaggaatcccaataaaagccgccgacggatcttctgccaaggatgatcgggtaaaaccaaaatgagcggccattggttaaccaaacataggtaaatcggaaaaggcaaggacgaatggtgattggttcaactaacaaaacggctccttgagaaccctgcggttttgggggtttcgctggtatttgggaaggaggaggtccctgcggcgcaccgccgaagcctgggctggcaccgctgccaataccagggccggagccgccgccaaaacctggaacagcgccaccgccaataccagggccggagccgccgccagagcccggaacagcaccgctgccaatgccaggccatggatatcggtattcatattcaaaagcaggccaaggctcataaaaatgccccgcaaacatataaggatcaacataatacatgtgataacgtcctttctcattgtaaactgtacactgcagtttatgcgggcggactcttattggtgcattcgcctaaggatatgaagctggaatgctctcaaagagcagaatcatttgatttttctctagtcttattcacaattccgatttatcattttataatgaaagtgcttctattacgaaaaaggagacagaccgtgaatatcgatcaattattatatcaatatatcatagacaacactgcggatattactgagaaatggttcagtttgcgttgccagctaaaaggcgagctatattccgccagccatttaagtgaagaaacgaaaacacttttaaccgagcagcatacatttaccaatataacaatcgcaagcgcatttctggaggatcaaaccgattttcaagacaacatgacaaaatgggcggaaaacgttgcgaaaaacagggtagagcaggatgttcaagttcatgaggtcgtagaagccatatccaactctagaatctcattctgggacgcagtcgccacatttataaaagagaatcaggagatcgtgacaaatgaggatgcagaccgatggaaccgcattgtgaatcagtcgttcgataagctgattattgaattctctgagcagtaccaaaaattcatgctgatgaggctcacatctcagcaggaactgatctcagagcttggctgcccggtcatttccattgccgatggaatcgggatattgccgcttatcggctccattgatacaaaacgggcacaggtcattttagaaacagtgccggtccgctgtgtcgagagaaaaatcacaagcctcgtcgttgatctttcgggtgttccgattgtggataccatggtggctcagcaattgtacaacctgtctaaaacgcttttcttattaggcgtcaaagccgtattttcagggattcgcccggatgtggcccaaacatcgattcaattggggcttgattttagtgaatatgaaacgtacggcacgctgaagcaggcattagaaaatatgggtgtccgctgtattgttgaggaattggaagaaaacaaataggaagtttccaggcatatgattgtccgtcaccgggtgatcatatgcctttttgatttgaacagaaatcaccattgatttatcaaaaaaaacataatattataattcttataagaatactgtgaattaaaacctattcaacagggggaaggtcttttggtttcaaaatcaacgattgatccggaagtgattgaaaaaatcatcagctcgctggaaacactcgatttcggcaccgttcaaattacggttcatgattctcagattacccaaattgagaaaatagaaaagcaccgtttttcgctgaaaaggaaagaatcaaaatgataatgtaaagggcgtttgttttcattaaattctccttaaaacatatacatatttcatccaatttttatataatagacctttaagatcattttttaggaggatttttgacatgcaagctacggttcacgagagtaagcaatcgatcatgcaacgcattttgacagtctttgtctttactttgctgatcgcgactgtcggcctttttatcggccaatttgttcctgtcgctttgatgctgccgctttctattcttgaagtggtgatgattattctggccttctggatgcgcagaagaaaagcggtcgggtatgcgtttgtatatacattcgcgttcgtttccggcattaccttatttccgatcgtcagccattacgcttccatcgccggcgcctatgtcgtgcttgaagcctttggttctacatttgtcatttttgccgtcttaggcacaatcggcgcaaaaatgaagaaggatttatccttcctgtggtcatttctgctggttgcggtgctcgccctcgcagtggtagggattttcaacattttcagcccgttaaactcagcggcgatgatggcgtattccgtgatcggaaccatcgtcttttccctttacattttgtatgatttgaaccaaatcaagcaccgccacattacggaagacttgattccggttatggcgttatcgctgtacctagactttatcaacttgttcatcaacctgctccgcttcttcggcattttgagcagtgatgattaatgaaaaagcgtctgtcattggataggcgctttttgccatacatcaaaaaggcaggtggagtattggtgaaaaaacaaatgggcgcatatgtatctctggcagcagctatggcgatcgtcggcagttctgtcgttgtcggcaagctgatggtcgaacggattccggtctttctttcctcaggattgcgttttttgatcgcttctgtcgtattgctcatgctgctgttttgcattgaaaaagggtttccggctttgacgaaaaaagatgtgttcgtattactggtgcaatcattcacaggcgtgtttttgttcagtatttgcctgctgtatggggttcaatatacgacgggaacggaaagcggcattttgacaagcacaacccccatggtgatcggtattttatcctttttcctgcttagagaaaaaattgagaaaaagacgctgatcggcattttgctggcggtttgcggcgtaatggcgattaatttgtttggagccgggagccaagacgggacgccgcacgccttattcgggaacatgctgatcattgctgcagtcattggcgaagcgttgtttacattgatggccaagctgctatccccgcatatttcggcactggcgatttcgaccttcgtatcgctcttcggcttcctgttttttctcccgtttgctttgtttgaggcctcttcatttgattacagcgtgccgactgttttggattggtcgtatgtgctgtattacgcgctttttgtcactgttttggcgttttacttatggtatagcggggtgacgaaggtgccggcgggtgtatcgggcattttcacatccgttcttccggtctccgctgtcattttgtcaggcgtgatattgaaggagccatttgagtttgtgcatttcatcggcattgcatgtgtcatcggcggcatatttgttacggtcataaagaaaaaacagccggatgcgtatccggctgcagaagaaaagacgctatagcctgtccggatcggacgggttttttagtctttaaacacgctcagcctttcaaaaagatcaccaagcatcttcacgaacatgtctttttcctcgtcgctgtagttttccatgacagcggatattttgctgaaatggccgggcagaaattgctccaggcgtgctttgccttctgttgtcagttcaatgctgatttttcgtttatcctctgtgtgatgcctgcggctgacaaaaccgtctctcgccagcccgtccagcaggcctgtaatcgtcgctttcgtgacgtttgactgtttggcaagctctgtcggacttaacctatgatccttggcatcaaagagcagcatcagtattttgaattttccttctgacagccctcggccagcaaagtaatgctccatcacatgattcattttttttgaaatatcaaaaagagataaaaacaattcaagagagccggcgtcaatattggaatacgtttcggcgtgctctgttatatgcttatatttcggtaaatgttttaattccatcgcaagtagctcccgtacattcgttgtgacacgattataaaggagggaaaaccataacgcaacttggcttggagatgattgacagcttttcttgggacatagtaaggtaatatagttaggcgcctaactaatacatatagagctgaaaaggtggttattgatatgaaacatatgttaattgcaggaggcggcatcggcggcttgtcagcggccatttctctccgtaaggcagggttttccgtcaccttatgtgaagcggcttcagaaaaccgaaaaacaggtgcggggattcttcagccgcaaaacgcactggcggtgttgaaagaactgggcgtattcgaagagtgctgtaagcacggctttcaaacagaatggtttaaaacgtttgatgaacaggggaatttgctgtttcaagtcagtgaatcctttttagacgattcacttccgggacgcaataatatcctgcgcaaaacgttaaatgacattctcatgaagcatgccgaggcagtgggtgtagacatcaagtgggggaaaaaggttgtcgcttatcaagaaacagctgaatcggtcactgccgtatgtgaagatggagaaaaaatgcaggctgccattctggcgggctttgacggcattcactccgttgttcgcgatataatgctgcaaaaggagacggaaaaagagcatctcggcatgggagcgtggcgcttttatatcgaacttcctgatcacacatttgaggacgcgacattgatgtacagaagcggagacacacaaatcggggtggtgccattggcacaacacgctggctatgtcttcgtcctccagccttgcacgagcgattactgggatgaggaagatacccggtttgatagagtaaaagagattctttctggttttcgggggctggattttgtcacaaagcacatgtcaaaacagcatcctgtcatctttaacaaactggagcaggtcgccgtgcaggagccatggcataaaggccgcgttgtcatcggaggagacgccgcccacgccggcgcgccgaccctggcgcaaggagcggcaatggcgatcgaggatgccatcgtcctcgccgaagaactccaaaaccacgccgatcacgaaacagcattacaggcgtactacaaaagaagagccccacgagcgctcaaagtccagaacctatcatcggaaatcgtccgccgcgggctgaaaggagagccgggagcggaagaactgattggggagtgctatgcggtgttgagggaagggtattaaataggaaaagtccagaaagtgatttctggactttttagtcttgctctgttttattccttatccgctcaatcacctcatgcagcccctcaggcttataaaactccaccggtgaactgcctttctcaaacgaaatcgtctcggcttcaatcagcgcgacatagcgcccgtttacttttgcgagatgaatagaatcgccaaaatccgctagcaatcccttaatctctgtttctccgactttcattttcagctgggcctctggcgtgtgctcgatgatttgggcggaggcttcgatgacttgatgggtgtcgaggcgctcttggatttcccgtttttcgcttgcttcccaaatctcaatgtcgtgctcgaactgcttgagttcttcgctgttgtcttcaaatgtctcgtagacgtgctcctgtaccatgttcatgacctggtttttcatgatttccggcatcgattctccgtactcgacgaatttcagaaagtcctcaaaatagcgggcgtgcgaggcctggtggattttcagttcaccttcctcgaccattccttcctctggcatgtacgggtattggatgcttttcatgttttttgtcgtgatcgccatttcgacttttttaatgagagaagacgcgtcagagatgcgggcgaccttcggctcaaaatcacatttcataatgaagacaaatgactcgtcaaagtattttctcggcacggccgaagcgacgagaaacacgccgccgcgaaccgcgcttgtgtcaaggtacgtgcggacgaactgctcgctcagctcattgaagtcttcttttgtttccgccagacgcgcgcggttgaacatgttgtagtttgggttggaatcgagctcgtggccgggctcgacgataaaatggccgattttcgtcggcacctgctcggactgcggatggcggtctgctttccgtttaacgatttttttcagttccccgtcgagaaagtccttcagctcgctttcttcaaattcgcccgtatcaagggtctggaagtgcttgaactgcttgttcgcctgctcatctttgccttccacctgtatgacataaaaggataaaaaccgaatttcaaaatccatatataaactcaccttattcgcgtattgtacagcttctcaagtatagaaaaaacagcgatcatgcgtcaattgggagaacggaataatcatgaccatgaaagggaaatgtagtcaaatagaaggcatctcatacggaaaggaatggttcgatgaaggaaacaagcccgattcctcagccgaagacgtttgggccgctcggcaatttgcctttaatcgataaagacaagccgacgctttcgctgatcaaactggcggaagaacagggcccgatttttcaaatccatacacccgcgggcacgaccattgtagtgtccggccacgaattggtgaaagaggtttgtgatgaagaacggtttgataaaagcattgaaggcgccttggaaaaggtccgcgcgttttccggtgacggattgtttacgagctggacgcatgagcctaactggagaaaagcgcacaacattctgatgccgactttcagccagcgggccatgaaggactatcatgagaaaatggtcgatatcgctgttcagctcattcaaaaatgggcaaggctcaatccgaatgaagcagtcgatgtcccgggagatatgacccggctgacgctcgacaccattgggctatgcgggtttaactaccgctttaacagttactacagagaaacgccccacccgtttatcaacagcatggtgcgggcgcttgatgaagcgatgcatcaaatgcagcggcttgatgttcaagataagcttatggtcagaacaaagcggcaattccgccatgatattcaaacgatgttttcgttagtcgacagcattattgcagagcgcagggcgaatggagaccaggatgaaaaggatttgctcgcccgcatgctgaatgtggaagatccggaaacgggtgaaaagctcgacgacgaaaatatccgctttcaaatcattacgtttttgattgccggccatgaaacaacgagcggcctgctttcctttgcgacttactttttattgaagcatcctgacaaactgaaaaaggcgtatgaagaggtcgatcgggtgctgacggatgcagcgccgacctataaacaagtgctggagcttacatacatacggatgattttaaatgaatcactgcgcttatggccgacagctccggctttcagcctttatccaaaagaagacacagtcattggcggaaaatttccgatcacgacgaatgacagaatttctgtgctgattccgcagcttcatcgtgatcgagacgcttggggaaaggacgcagaagaatttcggccggaacggtttgagcatcaggaccaagtgcctcatcatgcgtacaaaccattcgggaatggacaacgggcctgtatcggcatgcagtttgcccttcatgaagccacacttgtgctgggcatgattttaaaatatttcacgctgattgatcatgagaattatgagcttgatatcaaacaaaccttaacacttaagccgggcgattttcacatcagggttcaaagccgtcatcaggaagccattcatgcggacgttcaggcagttgaaaaagccgcgtctgatgagcaaaaggagaaaacggaagcaaagggcgcatcggtcatcggtcttaacaaccgcccgcttctcgtgctgtacggctcagataccggcaccgcagaaggcgtcgcccgggagcttgcggatactgccagtcttcacggcgtaaggacagagacggcacctctgaacgaccggattggaaagctgccgaaagagggagcggttgtcattgtgacctcgtcttataatggaaaaccgccaagcaatgccggacagttcgtgcagtggcttcaagaaatcaaaccgggtgagcttgagggcgtccattacgcggtatttggctgcggcgaccacaactgggcgagcacgtatcaatacgtgccgagattcattgatgagcagcttgcggagaaaggcgcgactcggttttctgcgcgcggggaaggtgatgtcagcggtgattttgaagggcagcttgacgagtggaaaaaaagcatgtgggcggacgccattaaggcattcggactggagttgaatgaaaacgccgataaggaacgaagcacgctaagccttcagtttgtcagagggctgggcgagtctccgctcgctagatcgtacgaagcctctcacgcatccattgccgaaaatcgtgaactccagtccgcagacagcgatcgaagcactcgccatatcgaaattgcattgccgccggatgttgaatatcaagagggcgaccatcttggcgtattgccaaaaaacagccaaaccaatgtcagccggattctccacagattcggtctgaagggaaccgatcaagtgacattgtctgcaagcggccacagtgcggggcatctgccattgggccgtcctgtcagcctgcatgatcttctcagctacagcgtcgaggtgcaggaagcagccacaagagcgcaaatacgtgaactggcggcatttacagtgtgtccgccgcataggcgcgaattagaagaactgtcagcagagggtgtttatcaggagcaaatattgaaaaaacgaatttccatgctggatctgcttgaaaagtacgaagcgtgcgacatgccgtttgaacgatttttagagcttttacgtccgttaaaaccgagatattattcaatttcaagctctccaagagtgaatccgcggctagcatcgatcacagtcggcgtcgtgcgcggccctgcgtggagcggccgtggcgaatacaggggcgtggcttcaaatgatttagctgagcgccaagccggtgatgatctcgtgatgtttgtacgcacaccagaatctcggtttcagcttccagaagaccctgaaacgccaatcattatggtcggacctggcacgggagtcgcgccatttcgcggtttccttcaagcccgcgatgttttaaagcgggaggggaaaacgctcggtgaggctcatctctattttggatgcagaaacgatcgtgattttatataccgcgatgagcttgagcagtttgaaaaagacggaatcgtcactgtccacacagccttttcccgcaaagaaggcatgccgaaaacgtatgtccagcatgtcatggctgaccatgcagaaacgttaatatcgatccttgaccgcggaggcaggctttatgtatgcggtgacggcagcaaaatggccccggatgtggaggcggcactgcaaaaggcgtatcagtctgtccatggcaccggggagcaagaagcgcaaaactggctgagacatctgcaggataccggtatgtacgctaaggatgtctgggcagggatatagataaagaagactggagacatccagtctttcagcgtgtcggcaaaccctcgcattcgttgtcaggactgcgcttcggtgctcaatgcgaagtggatcaacggctaaattctcaggcgtcctgcctaaacgccgtcgtcatcacatcctgtgaatatccgctcctatgctcgtccttcctagacttcaagggttttcaatcacgctgaaaagatgacaaaatcctaaaatggttttcattttaggattttgtcaacaatctggaagactggagacatccagtcttttttgtcctttcgaaaaaatggtgatcgcgctaaacattgatgcatacaataacttcagtccgccggaagggcgggctgtctgcaaaacctatttttcgtttttgctagtttatgttattcttatactcggtatctatttcttttttcaaaggcacacatgacaaaagaaatcctttttttatttcggagaaaaaaatgtgaaacgaaatgaaggtttctttcgtccagtgattggtttccaaatggttgtaataaaaatgatatggtgcgtaacataaatattccggcttgccgcggtgtatttcttgttgtgtgatgccttgattttgtttggaaagaaggaattggaaggcaggatataaagagcaggtaaatatgaatgaagaacttaaagtgtttaagaaagtagaggttgccatgaagaaacttttttcttacaaacttagcttttttgtgctggctgttatactgttttgggcaaaaacgtatttatcctacaagactgagtttaatcttggggtaaaaggcacaactcaggagatcctcctgatatttaacccattctcaagcgccgtcttctttttaggactggctttgctggcgaaagggcgtaaatcagccattattatgctgattatcgatttcttgatgacatttgtgttatatgcaaatattttattctatcgtttctttgacgatttcttgacgttcccgaacattaaacagtctggaaacgttggaaacatgggagacgggattttcagtatcatggccggtcatgatattttctatttcttagatattatcattttgattgcggtattgatctggagacctgaattaaaagaatacaaaatgaaaaaacgctttgcatctttagtgatcctttctgggatcgcactgtttttcatcaacctgcactatgcggaaaaagaccgtccgcagctgctgacaagaacgtttgaccgcaattatattgtgaaatatttaggtttatacaactacaccatttatgacggtgtacagacggctcaaacagaaacgcaacgggcctatgcaagcagcgatgatttaacaagcgtcgagaattacacgacgtctcattatgcgaaaccgaacgccgagtacttcggctctgccaaaggcaaaaatatcattaaaattcacctcgaaagcttccagtcattcctgattgactacaagctaaacggtgaagaggtgacgcctttcttaaataagcttgcgcacggcggggaagatgtgacgtattttgataacttcttccatcagacaggccagggaaaaacatctgatgccgagctgacaatggataactcgatcttcggtcttcctgaaggctccgcgtttgtgacgaaaggcgaaaacacctaccagtcgcttcctgcgattttagaccagaaggaaggctatacaagcgccgtcctgcatggtgattacaaatcgttctggaaccgtgaccagatttacaaacatatcggatacgacaagttctttgacgcaagcacgtacgatatgtcggatgaaaatgtgattaacatgggacttaaggataagccgttctttactgaatcgattccaaagcttgaatctcttaaacagccgttttacgcgcatttgattacattgacaaaccattatccgtttaacttagatgaaaaagacgcgtctcttaaaaaagcgacaactggcgataacacagttgacagctacttccagacagcgcgttaccttgacgaagcgcttgagcaattcttcaaggagctgaaggaagccggcctgtatgacaactcagtcatcatgatttacggtgaccataacggtatttctgaaaaccataaccgagcgatgaaagagattcttggaaaagagatcacagattatcaaaacgcacagaaccagcgtgtgccgctgatgatccgcgttcctggcaaaaaaggcggagtgaaccatacgtatggcggcgaaattgacgtcatgccgacacttctgcacttagaaggaattgattctcagaaatacatcaactttggtactgacttattctctaaagaccacgacgatacagtggcattcagaaacggagacttcgtaacgccgaagtacacatcagtcgacaatatcatttacgatacgaagacaggtgaaaaactgaaagcgaatgaagaaacgaagaatctgaaaacaagagtgaaccagcagctgagcctttcagacagtgtcctgtacaaagacttgctgaggttccataaactaaatgatttcaaagctgttgatccgtcagactatcattacggcaaggaaaaagaaatcaaataagatgaaaaagagccttgagcgggcgcattgccttcgctcaaggctctttttttggttatacaaccaacttgaaaaaatagattccatttggtcaccaaggctggctttctctcatatcattacagtagattttgaaaccggattgaaatcggacaaattatcggggaaatgccttgatagattgtgaagatgtaccaggtttcgaactcaatattcatagagatgaggggtagagatgaaagcggtcattctctgcggcggaaaaggaacgagaatgagtgaagtcacgaatgacattcctaaaccgctcgccatgataggcggcaaaccgattctatggcatattatgaaaatttatcagtactacggagtaaacgagtttattctgcttttgggctataaaggagaaaaaatcaaggaatactttctcgactatgaatggaagcacaacagcctgacactcgacagctctacgggagaggtacagatgctgggacagcctgaaacgtggaaaattacgtttttggagactggggaagatacgctgacagccggaagaatcttgcaggcgaaagactatatcggtgatgaaacatttctgcttacctatggggacgggctggccaatatcaatcttttccatctcatcagctatcatcagacaaaaggtgctgccgcgactgtcaccggcattgacaaagtctcgcagtttggcaccttgacggttgaggacggcatggcgaaaacattttctgagaagacatcaagtgacggaatcatcaacggcggattcttcgttctcagtccaaaggttttcgagtatttgccgaaggacgggaacgcgatgttcgaagatgaaccgctgaagaaccttgccaaagacggggagcttgctgtgtaccgccattacggattttggacggccatcgatacgtataaaaatctcttagaagtcaacaaaatgtggaatcaaggacaacaagtatggaaggtatggtgaatcgatttgagtttctggaaaaataaaaacgtatttgtcacgggatccacaggtcttttaggaagctatttggtgaaagagctgatcgatcagggcgcaaacgttacggggcttgtcagggatcatgtgcctcaatccaatctttatcagggagaacatatcaagaaaatgaatatcgtgcggggctctcttgaggacttggctgtgattgaacgcgcgcttggcgagtatgagatcgacactgtctttcatctcgctgcacaagcgattgtcggcgtagcaaaccgcaacccgatttctacctttgaagcgaatatcctcggcacctggaatattctcgaagcctgccgcaagcatccgttaattaagcgggtcattgtcgcttcaagtgataaagcttacggcgatcaagaaaaccttccatacgatgaaaacatgccgctgcaaggcaagcacccgtacgacgtctcaaaaagctgcgcagatctgatcagccacacctattttcacacgtacgggcttccggtctgcattacgcgctgcggaaacttatacggcggcggagatttgaacttcaaccgcatcattcctcagacgattcagcttgtgctgaacggggaagcgccggaaatccgaagcgacggcacatttgtacgggactacttctatattgaagacgccgttcaggcttatctgcttcttgcagaaaaaatggaagaaaacaatcttgccggagaggcctttaacttcagcaatgagatccagctgaccgtacttgaactggtagagaaaatattaaagaaaatgaacagtaatctgaaacctaaggtgctgaatcagggaagcaatgaaatcaaacatcaatatttatccgcggaaaaagcaagaaagctgctgaattggacaccggcctacactattgatgagggacttgaaaaaacgattgagtggtatacggaattcttcaaaaagtaatgtgaaacgaggtgaacaagactgtgaccagcgcgtattgcaccgttttatcaaaaggaagattatatcaggcagtcgctttgtttaagtcgttagagcaagttgatcaagacagtcccatttttatactttgcatggatgaagatacgcaccgcgtgttacagaagctgaagatgaagcagctgaaccttgtgccggtggccgctcttgaaaatgaattgctgctgaagctgaaggaaactagagatcaaagtgagtattgctggacgatgaagccgatctttctgcaagctgtgctgaacagcaatcccgagctggagcgcgtgacgtatattgacggggacctctttttctatgcagatccatcgccgatttttgaaaaccagccggactgctcggtgctgctttcacggggggatattgtaatcccttcttttgagaaagagcagattgacatgctgcagcgtcttttaggcagatataattccgggtttatcagcttcaagcatgatgatgcaggcacggattgcttggagtggtggaaggaacgctgtcttgaggaatgcaaaaatgcaccgggtgaagggaaattcggtgatcagggctatttggattatatgtctgagctgtttccgaatgtgtgtgacattacaacacccggcgtgaacatcggccattggaattatggacagcatacgttttcctggaaagatggccggatcgtgctggaggatggcagtccgctgatcttttatcatttcagcggataccgaatcgtcagcatcaatgaaatcaaacagattcatgaaacaacccgcacagatctgccgtttgtgcatgaactgtatcaagagacactgccgcatatcattcagcacatgaaaacgttagaccctgaatttaacggttttgcttcaaaagatgacaacaaataaatgagtaaatacaggaagtgaaaatgaagtgaaagcaagcgttattattcctgcatataattcaaaggagcgtctttacaacagccttctgtcattaaaccagcaggagtgcgatgaagaattcgaagtcattgtagcggacaatggctctgaggacgggacgctctcgatgcttgagtcatttcaagctgattttccgctgatctttacacggattaaagaaaacaggggcattgcgtacggacgaaatcaggcgcttcgcaatgccagaggagacatcctgattttccatgacagcgatatgcttgcggcaaaggaccttgtggcaaaacatattaaagcccatgagaacgaagagaatctcgtcgtgtgcgggttgttttggaaacggatctacagtttttactatgaacggtttgaagaagaacataaggaacagctcgcaaagctcacaggtgaaatgccgaagaaagacaaacaaaagctgctggaggaagcggacatcaaaaacggaagctttcttgataaaagctttgacctcgataccgactttatagacgtgctcaagaagattttagatgagtacggcgatgacttgaaaggctatcatatgccatggcgcttttttatcacgaataattcctctgtgaaacgcaagcatgtggttgacctcggtttatttgacgaaggcattgtgcggtacgggtttgaggattatgacctcgggatcaggcttcatcaggccggattgaccttcaggcttcgccgtgatattgtcagtgttcatcaggaacatccaagcaattgtaagtctgtagacgatattcgggcaaacattgcctatatgtgcgataaatacaataacatccgctccttagacgttcatctcgcttttaatgggccgttcccgcctgacatgacgaacagaatcatggctgatattcaaaagctgctggaatcacagaaatatgatatgctgctgaatctgtttcttgagcttctgcatgttgttaaagagcgcaacattgatccggattggcgaaagaaatccccaagggtgacggcgaaaagctttgatttacaaactgtccgcaagcttctgcctaaggcgaagaaaaagctaggcgtgaacgattttgccaacgcactgtatgcgcttgtcaacgatttgctgcacgtggatcttagatcattggatgtggtataagtgagtacatttcatttttcaacgatagtgtcaaggacacatatctttaagctcatgcctatgattcattctctccatgagcattgcgatgattttcatttatatgtgctgtgtgtcgaccagaaagcgtatgaattgcttcagcacgtgccatgggagcatgtaacctttgtgcagctgcatgaaatggaagacccggagctgctgaaagcgaaaagcaacagaacgtttcatgaatattgctggacgttaaagcccgcctttttgtttcatgtgatgagcaagtgggatgacgctgaatactttgcccatatggatacggatctatttttcttttctgatccggcacgtatttttgcagaaaacccaacggcgtctctgtatttgactgatcatcgtaattcgccgcgcttcatgtcctactacgaccgaaccggacgctttaatacaggctttgtcggcgccggtaatacaaaggaagcatatgaagcggtgtggcagtggagacaggactgtattgaattttgcacggtcgaaatggatacggaacgaaagacatatggtgatcaaagatatgtggagaaatggccggagcagtttaaaggtgttcatgttgtcaaatccataggagccaatacagcgctttggaatatcgaaaactataaggtcgggcaaaaggacggccgcgtgtatatagatgaaacgccgctgattttctatcatttctctgggtttacgctggtgacagaaaaagagtttaatctttgctggtactaccggattgaagacgaagcgacaattaagatgatttatatgccctatatattaaatctgaaaagatggattgatgaaatacagtcggcgtttccggactttgcggatggctttatcccgaagcacgcagtgcctgacactcattttatccagctggattaaaaaaccccctgccgcctggcaggggttttttcagctatgccattctctcagcttctggtcacttggcaataggaaggcaaggatgccgaggacagggagaaaggcaatggcgatcatcgtcggggtcagtcccgcggcatcaatcagagcgcccagcgccacagcgccgattgcgcccatcccgaaggcaagcccgacggttaaaccggacattgtgccgatttttccaggaactagctcctgtgcgtagacgaccgttacagaaaagctcgacatcagaaccaagccaatcaatgcgagcacgccgtaggcgagaaccgggccggcaaatggcagcacaatcgccagcggcgccgagcataacagcgaaccgaggataacgaagcgttttccaaaacggtctgcaagcgggccgccgagaaacgtgccgatcgcgccgaacagcaagaagacaaaaatatagctttgtgcctgctgaatgcttacgtgataggtatccatcgcgtaaaacgtgtaaaagttaccgatcgcactcgtataccaagaacgagcaaaaatgagaaatataataataataagagcagatacaacagatttggtgatggccgtgttttcagccgttttcttttgcttgcctgatttctgggcaaggctgccgagacgtgaggcgtaccatttcgcaatatacatgagaaacataacagcaagcgcggcgacaagcgtgaaccaaacagcgccgaattgcccgagcggcacaaggatcagcgcggtgatcagcggtgccatcgcctggcctgagtttccgcccacctgataaatcgattgggcgagcccgcgttttgtgccggcggccatatacgccacacgggagccctccggatggaaaatggccgagcctaatccaatgaaaaacacacagcataagatcgttatgaatgacggggcaaatgcaaggcccaaaatgccaagcatgctggcggtcaaaccgactggcagcgcatacggccgcggccgtttatcggtataccagccgacaacaggctgcatgacggatgacaccatgtttaatgtgaaagcaatgatgccgagctgtgtaaacgtcaggctcatggagcgttccaaaatagggaacatggccggaatcacagcctgaagcgaatcgttgagcatatggcaaattccgataataatcaaaatcggatacaccgtggtgcctggtttttgaactgttttttcttttaacggggcggcgatagccattgagtctcctccttacatatataaccaaagcataccaccatattattcataaggtgaagaatttatcaagaggaaaaaagattcttatgaaagaaataccgtcagcctgattagcagctgacggtattttcgatattcaaaatgtgatatagctcttcaagcttacgaatctcataggttggtatgatctctggcacattcggcttcatgtcagggttcatccagcaagtatcaagcccggcgagctgtccgcctttgatatcagcagttagtgaatccccgatgattaatgtgtgctctgctgaaaattgaggaatccgttcaaacacgtaattgaaatattccttcatcggcttttggaagccggtgtcttcagaaacgaaaatgtccttgaagaatggaaataatcctgaatcacggagacgcttatattgtgtgtgagacacgccgtttgtcacgatgtacaaatcaaactgttgctgcagatttgagatgagatcaaatgcaccgtcaataagctgatgtccttcttcaagaaagcggcggtatttttgctcaagcaaagcgccgtccgcttcgtaaccgtactccttgagcaaagcggaaaaacgtgtgtttacgacttcatcccgtgtcatcttaccttcttcaaaggctctccagagaccttgattgatggttttatactgcgccttcatgtcatttgttaaaggaatgttctgatcttcaaacagcaaacgcagggctaaagcttctgccgcttgaaaatcaaggatggtatcatctacatcaaataataaagtgcggtatcgcttcatctgtgtgtctccctttctcatatgtattcaaagtatagcacataaaaaaaggaaaaagccggcgggtgaggcaccgccggctgaaaagagattatttgtttaataagctgtgttttctcgaatataggaagtaaaccagcgttccgacagcgatccagatgacaaatgaaagccatgtgacgccgggaaggctgtacatgaaccaaaggcagatgcctgcgctgataatcggcacaaccggaacgaatggcactctgaaggacgctttgatttcaggatgtttctttcttaacacaatgacagcaatggaaatgaccgtaaacgcggcaagtgttcccatgttcaccagatgggccagcgttccgaggttaataaagccggcgattcccgctgcaacgatccctgtcagccatgtgttgcggaacggggttttaaatgacggatgaacctttgcgaacaatccaggcagaaggccgtctctgctcatggcaaatgtcaagcggacctgtgcgtacagcaaagcgagcatcaccgtcgtaatcccgataatcgcaccgacagaaataattccggcaacagcgtcctgtccgacgaatttcagcgcaaaggatacaggatctccgacattcaatttggcataaggcatcatgcctgtcagcacaagcgataccgcgatgtacagaaccgtacagacggctagagctgaaataatgccgacgggcatgtttttttgcggatttttcacttcctctgatgcgttagaaaccgcgtcaaacccaaggtacgcgaagaatacagtggcagcgctaagtatgacgcctttcatcccgaatggcataaaaggagaccagttatccggtttcacatagccgatgccgacaataatgaacaataatatgatcgcgattttcatcagtacgatgacgttgttaaagcgtgtgctttccttgacgcctctgctgacaatcgcagtgatgaggagaatgatcaccgcagccggaaggttaaatacggcgcccgccgtgcttcccggcgctcctgtcagtgcagccggaatatgaagattgaagccggcaagcagtgattgaaagtatgaagaccagccggtggcaaccgccgacagtgcaatgacatattcaagcatgagatcccatccgatcaaaaaggcgagcagctctccaagtgtcacgtatgagtatgagtacacgcttcccgaaatcggaatggaagacgaaaactcagcataacagaaagcagccagcgcacaggcgagccccgctaaaataaacgatatgatgagggcgggacctgcaccggtcgctgccactgttcctgtaatgacaaaaatccctgtaccgatgacacaaccgataccgagcaaggttaaatcaaatgcgcttaacgtacgggcaaggctttttgacttgctctgcgcactcaatgtttcaagcggtttttttctaaataatgaactcatcaaaagttcctcctagaaatattcaaaatattctaatcattatatgcagttcttgttgtattatattgtcgaaatttgacgtagtcaataaaatatttttctgctttaaatgatagaagcgaaacagcgttgtcgtatcataggatagtaatttttactaatcgtatattcaattttatgcaagatgaaccgatagaaaaaatagattcgcccatattttgatttgcggttataaaggagatgctgaccatgtttcaatatgaagagttgaataaacagtttatcggcgggaaatggcaggagggcagcagcccaaatgtattggaaaacaaaaatccttatactcaaaaaacattcacaacattccgtaaagcgactgctgacgatgtagatgaagcgtatcgggcagcggcgctggcaaagaaaaaatgggatgcggtcaacccgttcgagaaaagaaccattttagaaaaagccgtcacgtatattgaagaaaatgaagaagccattatttatttgattatggaggagctaggcggtacaaggctcaaagcagcttttgaaatcggtcttgtcaaaaacatcataaaagaagcggcaacgttcccaatccgcatggaggggaaaattcttccgtcaacaatagatggcaaggaaaacagattatatcgcgtgccggcaggcgttgtcggtgtcatcagtccgtttaacttcccattctttttatctatgaaatcagtggcgcctgcactcggagccggcaatggcgttgtgctaaagccgcatgaggaaacgccgatttgcggcggaacgctgattgcgaaaatttttgagaacgcgggaattccagcggggctgctgaatgttgttgtcacagacattgctgaaatcggcgacagcttcgttgagcatccagtgccgcggatcatctcatttaccggttctacgaaagtcggcagctacatcggacagcttgcgatgaagcattttaaaaagccgcttcttgagcttggcgggaacagcgccttcatcgtacttgaggatgcagatatagaatatgcggtcaatgcggcggtgttcagccgatttacacatcaagggcagatttgcatgtcagccaaccgcgtgcttgttcattcttctatttatgacaagttccttgagctgtaccaggcaaaagtggaatcgctgaaagtcggcgacccaatggaccctgatacgattatcgggccattaatcaacagcagacagacggacgggctgatgaagactgtagagcaagcaattgaagaaggcgctgtaccagtgaagcttggcggatttaacgggacgatcgtggaaccgacgatcttaaaagacgtcaaaccgttcatgagcattgccaaggaagagctgttcggaccagtcgtctcctttatgaagtttgattcagaagacgaagcggtggatatcgcaaacgaaaccccgtttggcttgagcggtgccgtacatacgtcaaatcttgagcgcggcgtggcttttgcgaaacgcattgaaacaggcatgattcacgtcaatgacacgaccatcaatgatgaaccgaatgtagccttcggcggtgaaaagcaatcaggcctcggccgtttaaacggtgagtggagcctcgaagaatttacaacgctgaaatggatctcggtccagcacgaaaaacgcagcttcccttattaatgaaaaggagtgaatggaattgaccataaatacggaaaaagaaaccgcagatattctggacgcatttatcaaagtagccccttatttaaacagcctggttcaggatgatattacaatcggcatttatgatacggaaaaactgctcgtgaatataccggccaaaaccttttcgctgaacgtaaaagccggcgatccgctgcaggaaggggatatcatcacagatgccatccgcagcaatcagaagaagacgagcatggttccgaaagaattgttcggcttcccattgatcgcgcgtgccatcccgctgcacgacgagaatggaagagtcattggaggcgtcggcctcggaacgagccttgaggagtcgtcaaagctgcatgatgtcgcggaaagcttatcagctgttgttgaacaaacagccgcggctatttccgacatttctgaatcaattaacgggttttcaactcaaatgtcgggcatttcctctcaggcgaaaaaagtaagcgaaagcgccggtgaaatcgccgatatttcagtaactgttaaaggcatctcggaccaaagcaatctgctcggcttgaacgccgcgatcgaagcggcaagagcaggggagtccggaaaaggattctctgtcgtcgcagatgagatcagaaagctagcgacgcattcaaaagaaaatgtcggccaaattgaccagattacgaaaaaaatccacagcctgctgaaagggctggaggaatccattgagtcgattaaccagcatacagacggacaagccgctgctgttgaacaaatttccgccacgatgcaggagatttcaggaagcgcgcagcatcttgcgaaaatggccgaaaaagcgcttgaggaagagtaagagaccggggacaaacatccccggtctttttcttatcctgcatttccatgaaattcgtctgacgttttactagttttattccagcggctgatttaaaatgtacacatgaacttacgtgaggattgataggaaccatgagcatattaaaagcggaaaatctttataaaacatacggagataaaacattatttgaccatatctcctttcatattgaagagaatgagagaatcggattaatcgggccgaacggaacaggaaaatcaacgctgttgaaagtgattgccggcttggaatctatcgaagaaggagaaatcacgaaatccggaagcgtgcaggtcgaatttcttcatcaagacccggagctgcctgcggggcaaacagtgctggagcatatctattccggtgaatcggctgtgatgaaaaccttgcgtgaatatgaaaaagcgctgtatgaactggggaaagatcccgaaaatgaacagcgccagaaacacctgctggcagcacaagcgaaaatggacgcgaacaatgcatgggatgcaaacaccttggcaaaaaccgtattgtctaagctgggcgtcaacgacgtaacaaaaccggtcaatgagctctcaggcggccagaaaaaacgggtggccattgccaaaaacttaattcagcccgctgatttgctcattttggacgagccgacaaaccatttggataatgaaacgattgagtggcttgaagggtatttaagccaatatcccggcgccgtcatgctggtgacgcacgatagatatttcttaaaccgtgtcaccaaccgcatttatgagcttgaaagaggcagcctctacacttacaaaggcaactatgaagtgtttttagaaaaacgcgcggaacgggaagcgcaggctgagcaaaaggaaacgaagcggcaaaacctgctgcgccgcgaactggcttggctcagacgaggagcgaaagcccgctccacaaaacaaaaagcgagaattgaccgggtagagacgcttaaagagcagacaggccctcagtcatcaggttcactcgattttgccattggctcgcaccgtctcggaaaacaggttattgaagcggagaacgtcatgatcgcttatgacggccgcatgctcgtcgaccgttttaatgaacttgtcataccaggtgaacggatcgggatcatcgggccgaacggcatcgggaaaacaacgctgttaaatgcccttgccggccgtcatacgccggacggaggcgatattacgatcggacagacggtcagaatcggctactatactcaggatcatagtgaaatgaacggtgagttaaaagtcattgactatataaaagaaacggcggaggtcgtaaaaacggcagatggcgatatgattacagctgaacaaatgctcgagcgtttcctcttcccgcgttcgatgcagcagacgtatatccgcaagctgtccggcggggaaaaacgccgtttatacttgcttcaggttctcatgcaggagccgaatgtcctgtttctcgatgagccgacgaacgatttggatactgaaacattaagcgttcttgaggattatattgaccagttcccaggcgtcgtcatcaccgtatcccatgaccgctatttccttgaccgcgtcgtcgaccgtttgattgtatttgaaggaaatggtgtcatttcccgctttcaaggctcctatagcgactatatggaggagtcaaaagcgaaaaaagcggccccaaaaccggcagctgaggaaaaaacggctgaagccgagccgaagaaaaaacggaaaaagctttcttacaaagaccagttggaatgggacggcatcgaagataaaattgcccagctggaagaaaagcatgaacagcttgaagctgacatcgccgcagcaggcagtgattttggcaaaatccaagagctgatggccgagcaggcgaaaacggcggaagagcttgaggctgcgatggaccgctggacagaattgtccctcatgatcgaagaactggaaagctaaaaagcgtggccgcagcaggccgcgctttttttcacataatggacaaaaacgaaccggcctgcttatgttaggataaagttgtgtgtcagcggcacatggaaaactaacggagatgatgaagtatgacatgggcgatcgtgatgttaattctcatgagtctggtgaaaatcgtattaacctgtcttcctacaggcgtcatagaatggctgctcggcaaatttgaagtgcacgccaagctgagtgacgaaaatgcgagtctctctctagatggaaaacgcctcgagggtgcagagaagcagaaagtgattgatcaatttaacgaagctatcttcctggaaaaatattatatctatccaggtgatgaagagcgttatttacatccggaaaacggcggcacgcctctggtgatagatacaaaaaaaggaaaaaaagacgtgaagctgttcgtgtaccgctacgacgaccatatcgacgtcgtgaaacagtacaagaagaaagtgatcgcgtatcgagtgctttctgaaagccttcaaaaagagtctctgtcagtggcgggaagtttagcttaaacaggaaagtgaaagacgggtgctgtatgctgctcgtcttttttattgttttttaaaacttaacgtttacgttaaggttcaaaaggtgtataatggtaacagaaacggcgaagggggatttaccttggaatggatgaagattgatcaagtggccaaaagaagcgggctgacaaagcggaccatccggttttatgaagaaatcggcttgattccggcgccgaaacggacagacggcggtgtaaggctttattcagaggatgatatggaggagcttgagaaagtcatcagcacaaaagaggtgctcggtttttcccttcaggagcttcagcatttcatggaaaccagccgccagctagagttaaacaaagaggggtatttgttgtcactggatcctaaggaacggaaagaaaaactggaggaaattcaggaaaccctgaatcaccagctggatttgattgatgagaaaatccgcacattccaaagctttaaagaacgcctgcagggcatgaaaaataaagcggaacgcgccattcaatcaatcgaatgaaaagtttgttaaacgctatttttgtagcgtttcttttaatggaataaagatggaggttaggtcaaatggataagacaacacaagtgaatcagaaaacgggtttgctcagccagccaaaagcggtatgggctgtcgcgtttgcctgtgtgatttcctttatgggaatcgggctggtcgatccaattcttccggccattgccgcacaactacatgcttcacctagtgaagtatcactcttgtttacaagttatttgcttgtaaccggatttatgatgtttttctcaggagccatttccagccgcatcggcgcgaaatggacattaattctcggacttatttttattattgtgtttgcggggcttggcggcagctcaagctcaatcgctcagttagtcggctatcgcggcggctggggattagggaatgctttgtttatttcaacagcgcttgcggtcatcgtcggcgtgtcagtcggcggcagcgcccaagcgattattttgtatgaggccgcgctcggtctcgggatttctgtcgggccgcttgcaggcggagagctcggaagcatttcatggcgcgcaccgttttttggagtatctgtcctgatgtttattgcgttaatcgcgatttctttcatgcttccgaagctgccgaaaccggcgaaacgcgtcggtgtgtttgatgcgatgaaggcactcaaatataaaggcctgctgacaatggcggtatcggcattcctatacaactttggattttttattttgctagcttattctccgttcgtactggatttagatgaacacggtcttggatatgtcttcttcggctggggccttctgctggcgattacgtcagtctttacggcgccgctcgtgcacaaagcgctgggcacagtgcgttcgctcgtcgttctctttatcgcctttgcggccattctcgttattatggggatctggacagaccatcagactttgattattacatgtatcgttgtcgctggtgctgtcctcggtatggtgaatacgatcatgacaaccgctgtgatgggttctgcgccggttgaacgttcaatcgcgtcttcagcctacagctcagtccgcttcatcggcggcgcgctcgccccgtggattgcaggaatgctgtcagaacactttactgcaagcacaccatatacagtaggcggaatcgtcgtttttgtcggcatgcttgtccttctcatgggacgtaaacatcttgctggaattaaggcggggcattaataacgaaagacactgcacagatgcagtgtctttttttaatcgtggaatctccccattactaccgtattgtagtgatttccgtcagaaagcaatttctccttttttaagattccttctgcttcaaatacgtatgtttttatagtgaaatggctctttaatttgtttccaggatattcagtgagatttttttaattccgttggcatccgcttcggtcaggcattgatgcggctgggatttatcttgcagaagctgagaatgtgtccgttcatttacgattgccatttcaagtgatggttcatgctgtagagggaacgtttgccatggataaggcaaagcctgacgaatatgatcataaatgtttagaaacgctctatcaatacatacacagcgtcatgaaaaacagcttttctcggtcgagtggtttaccgcttgggcagatgaggaggattttgagctgtctgccaaaaaagagctgacccttgatgaattcacatctccattgcagctcattttaaaagacagagagcttttgagaatcgttaagaataaacggcagtaaaaaacccgcccttcagcaggcgggtttttttataaattaaagcactttcgtcgtccaagactcgcagttccatgtttctgtcgcgatatccatataaaagtctggctcgtgggaaatgagcagaatggagcctttatattctttcagagcgcgcttgagctcttccttggcatcgacatccaagtggtttgtcggctcatcgagcaccagcaggtttgtttctgagttgattagcttgcacaatctgactttcgctttttcgcctccgcttaatacggagacgcggctttcgatatgctttgtcgtcagcccgcattttgccagagcggcacggatttcatactgcgtataagaagggaattcgctccatacttcttcgatgcacgtattgttgtttgtttccttgacctcttgctcgaaatagccggtatagatgtgctcaccgcgttcaacagagccttcgagcggctggatttcaccaagcaaacttttcagcaatgtcgtttttccgatcccattcgcgccgtaaagggcaattttttggccgcgctccatgcggaggttgagcggacgggacagcggggaatcgtaaccgatcacgagatccttcgtttcaaaaatcagcttgcctgacgttctcgccggcttaaagtggaattccggctttggcttttctgccgcaagctcgatcatatccatcttatcgagtttcttttggcgggacatcgccatgtttctcgtgctgacacgcgctttgttgcgggcgacgaaatccttcagctccgcgacttcctgctgctgctttttgtaggccgcttcaagctgctgttttttcacctcgtagacttccataaactgatggtagtcgccgacataacgtgtcagctcttgattttcaacgtgataaatcaggttgatgacactattcaagaacggaatatcgtgggaaatcaggatgaacgcgttctcgtattcctgcaggtagcgtttcagccattcaatatgctgttcatcaagatagttggtcggctcatcgagaagcagaatttccggcttttcaaggagaagcttagcgagaaggacctttgtgcgctgtccgccgctcaaatcggtgacatctcgctctaaaccgatatcgctcaaaccgagaccgcgggcgatttcttccaccttggaatcaatgacataaaaatcattgtttgtcagcgcgtcttgaatgacgccgacttcttcaagcagcttctcgagctcgtcgggatcagcctcgcccattttgttgtaaatctcgttcatttcctcttccatcgcaaataaataatggaatgcgtctttcaggacgtctcgaatggattttcctttttccagcacggtatgctgatcaaggtatccgacacggacgttttttgaccactcgacttttccctcatcaggttcaagctttccggtaataatattcatgaaggttgattttccttcaccgtttgcgccgatcaaaccgacgtgctcgccttttaacaggcggaaggaaacgttattaaaaatggcccggtccccgaaaccgtggcttaaatcctttacagataaaatactcatgtttacacctctatcgttatcaaacacgcacaatcggcgtgtaatattcactcttttgattataaaggaggattcggaatgttgaaaggtataggaaagaaaaagaaaaattgcgttccgggcgaggttttgagatactatggaatagatttcaggaattgaggagaacaaaatgacgcaaacttggccatttttacataatgcacaatcatttatacaagagaattggaatgcttccggctttcaaacgccaacccctgttcaagagcaggcagcccagctgatcatggacggaaaggacgtcattgcagaatcgccgacaggtacagggaagacgctggcgtatgcgctgccggtcttggagcggatcaaaccagagcaaaagcatccgcaggctgtgattttagcgccttcccgtgagctggtcatgcagatttttcaggtgattcaggattggaaagcgggctcagagctgcgcgcggcttccttaatcggcggggcgaatgtgaagaagcaggtcgaaaagctgaagaaacatccgcatatcatcgtcggcacgccaggcagggtatttgaactgattaaagcaaagaaactcaaaatgcatgaagtgaaaacgattgtacttgatgaagcggatcagcttatcctgccggagcatcgcgaaacgatcaaacaaattattaaaacgacattaagagaccgccagcttctatgtttttccgcgacactcaaaaaggaaacagaggatgtgctccgcgaattggcgcaagagcctgaggtgttgaaggtacagcgaagcaaggcggaggcagggaaagtgaaacatcaatacctgatttgcgaccagcgcgacaaagtgaagctgctgcaaaagctgtcaaggcttgaaggcatgcaggcactcgtatttgtgagagacattggcaacctgagtgtatatgcggaaaaactggcatatcaccacgttgaactcggcgttttgcacagtgaagcgaaaaaaatggagcgggcaaaaatcattgccgcattcgaagacggagagtttcctcttttattggcgactgacattgccgcacgcggtttagacattgaaaacctgccatacgtgattcatgctgatattccagatgaagatggctatgtccacagatcaggacgaacaggccgggccggaaaagaaggcaacgtgctgagccttgtgacaaaattggaggaatctaagctgaaaaaaatggcgaagaagcttggtgttgagctgagtgaagctgtgtatgcaggcggaaaactgaagacgaaataaaaagaagggcgaaaagccctttttttgttgtaaaataatagaaaaagtttcgcgcagggggtgggaaggtggtttcaatagacaggtttcaagcagtgaaggagtcagagctgaaaattcttgaaagctggtttgagaatgaggataccagacggagaatggatgggatgctgccattagatgaatggtatgcacgagtaaataaagataaacacgatactgtcatcatggcgtatgatggacagctgccggcagggatggtcgttattgagttcggggagaagcggacatatattggattgatcgtcaatcctttgtaccggcttcaagggtacggaaaacggatattgcaaaagctgatgaccgaacctgattttactagcgtgcgggaatgggtggcatgcattgaagaagacaatcgaatcagtttagcttgctttcaagcagcaggattcactttggaagatacagaacctgatgaagatggttttcttacgctgattcttcgcagctgatctcatcgaaacacaaaaggagggcaaaaagccctcccgttttcatcttcattcagctcggatcactgaccttgatcagctgtttccctttattttctcccttaaataaaccgagaaacgcgtcaggaatgttttcgaagccttctgtgatggtttcctcgtaatggagtttaccagccttcagccattcggccagctgttttgctccctcagaaaaacgatcggagtagtcgcttacgataaagccttgcatcagcgacttcgttttaatgagttttgattggacacgagggcccatgtcatctgcttcgctttctgcgttataggaagaaatggcgccgcacaccggaatgcgggcaaattcattgagcagattcatcaccgcgtctgaaatcggtccgccgacattgtcaaaatacacatcgacaccgtctggacaagcgttttgaagcgctttttggatatcatccgctgttttgtaattgatggcttcgtcaaactgaagctcctgttttaaatagtcgattttttcatcagaacccgcgataccgacaactcgcgcgcctttgattttggcaatttgcccgactgttgaaccgacggctccggcagctccggagacaaccacggtttcgccttccttcgggcgtccgatgtccagcaatccgaagtatgctgttaagccggtcattcccaaaatgccgagataggccgaagcgggagcaaggcttgtatcaatttttcgcaaggcagactcgctcacagcggaaaattcctgccagctgagatttccgatgacgatatcgccttttttcagatgattcccgtctgacacaacttcagcgataaccccgccagaaagcgcttcatccaaggcgaacggctcaacatatgacttcgtatcctgcatacggccgcgcatataagggtcaaccgaaacataaagcgttttgacaagcacttccccttgcttgggttcaggaaccggaatggtttcaaagcgaaagtcttcatgaacaggaataccttgtggacgtcttgctaattgaatttgctgctgagatgctgtcattttcatcctcctatcacttggttgacaccactgtaacatggacaggagaggaaatacaaaaggtaagctggcatacaaaaaaggagagggggctcctctccttttcatttcgcccgtaatttcgggcacagtcccgtcggcaggcacattggcttctggtcgatcgggcttctcatgatgcagcattccaagccgaagacttcacggaaaaatggctgggtgaacacatcttccggtgttccggcgttgtatatttttccgtccagcacactgattagatagtcagcgtattgagcggcttggtttaaatcatggagcaccatgacaacggtgcggccatggtcgcggttcagctttttcagcagttcaagcacttcaatctgatgtgagatgtctaaatacgtggtcggctcatcaagcaaaagcaaatcagtgccttgcgcaagtgccatggaaatccaggctctttgtctttggccgcctgagagggcatcaagtgtccgatccttcagttcaatcatgcccgttgcttccagcgcccactctaccatgtcatgatcctcttgggtatgcttggataacagctttttgtgaggatgtctgccaaaatagcataactcctctaccgtcaatccttcaggggcctgaggagattgtggaagaatggccagtttttttgcgacttcttttgatggctggcggtggatgtcttttccttctagtagcactgtaccgcttttcggggccatcagcctggcgagcgatttgaggattgttgatttaccgcagccattagcgccgatgagcgcagtgatttttccttcttctatctttaagtcgactccgtcaataatcactgtactgtcatatgaaagagtgagctggtctgcagccagttttcccatggtatcctctccctactgtttcctcgcttcgaatttcaataaatataagaaataaggcgcgccgatcacggctgtcagtattccggcaggtatttcaaccggaggcatgatgccgcgccctaacgtatctgcaattaataatataatagcaccaatcaatgccgatgcaggcagtaaatatttagctttttctccggtaagccgtctggcgatatgcggagcaagcaagccgataaaaccgattgagccgacgacggctacacagcttcccgccagcgccaccgcggtgaaaatcaggatgaatctcagccggtttgcgttttctccgagaccctgtgcaagctcatccccgagtgacataagatccagcttcggtatgagtatgcagacgatcggaaaaagaatcaaaagccatggcgcaagcaggttgacttcttcccagtttcttccccagaggcttcctgtcagccaaatgagtgcagcattcacgtcgcctggaaacttgaccatcatatattgcattccggcgtggcagaccgcgcctaaagcaatgcctgataaagccagtgaagagggctgaatgctcttttttcgggctatcattaataatagtacagcaataatggcggctccggcaaatgcggagaacggaagcacgtataccggcgactcaggaaagatgagaatcacagccatcgccgcaagtccggagccttttgaaatgccgacaacgtccggggaagcgagtggatttcggatcacaccctgtaaaatcgctccggcagcggcaagcccagcaccggccaaaatcgctaatataatgcggggaaggcgatattgctggatgataaattcaaaggaatgatccagtcccagcagattcgtcactaccgcatcaggtgaaatgtataatgcaccgattccaatgctgatgacggacagaacgattaaaatcacggccaatatgagtatcgccagtaaggggcgtttttgttttctggttgttttcttcatttcagatgtcgccctttccttgccaaatataagaaaaacggcgttccgataatcgcggtgacaatgccgaccggtgattcataaggaaatgcaatccatctggccagtacatctgcgtacaccagcaaaatggcaccgaacagtgccgaaaacggaagcacgtattgataatgttctccgatcagcttgcggacaatatgcgggacgagcagcccgacaaagccaatcggcccggcgacggctacggaagcgccggaaaggattaaaataatcaaactgatcagaatccggatgccgttcatattttgtccaagcccttttgctgtttcgtctccgagaccgagaacagaaacagaaccggaaaatacgagggcaagcccgatgccaatgacagaaaacggagcgatggttatgacgtcctgccagttgctgccgtcgattgcgcctgtcatccagtacagaacatcctcacctgactcatttaaaataatgatggcctgtgtcatagaggagaggaacaaatgcacggccattcctgacagcgccagcttaacaggtgtcattccgccggatgaggcaatcatatacacaatcgcgccgcctgctgccgcacccgcaaaagcgaatataacagatgaatagggcgatgccggcagaatgacgagagaagcaacgacaaaaagcgatgcacccgcattcacaccgaaaatttggggtgaagccagagggtttctggtcatagcctgcattagcgcccctgctacagctaggctggcgccgacaaaaacgccgattaatgtgcggggaaggcgaagagtagagatgatgagctgttcctttgaaccgtcccatacaaaaagatatttcaatgaatctatgatgccgatgtctgaggctcctactgaaagattcagcccaagcccaaatataaaaataatcagtgcaatgatgaacatcatcagtcttgatgatgagcgccgtttggctgattgatacaacagtctcacttccttactgcgtctggttgcaaaaacgaagaagcaaggattcccctcgcttctcatttgtcctatttattatacacttttttaagcacatctttggcgcttgtttcactagacttgatgcctctgaatcttgtccaagtgtcacggtccgcatcatagacttgtccatttttcaccgctttgagatttttccagagcgggttcgttttccactcatctacaatggttttgccttcgttggctgagatgaacaaaatatcaggatcgattttgctcaattgctcaaggctgacctcttgataggcgttatctgacttcacagcgtgtgtaaagcctagcattttaaagatttctccgtcataggatgatgatgtatgaagctggaaggaatccgctcttgcaacgccgagaacgatgttgcggttttcatctttcggaagttcggcttttagatcgttgatgacttttttgtgctcggcaagcttttcttttccttcatcttctttatttaatgctttagcaatggtcgtaaagctgtcgatcgtttcgtcatatgtcgcttcacggctttttaattcaatcgtcggagcgatttgtttcagctgtttataaatgtttttatggcgctcagcgtcagcgatgattaaatcaggcttcaaggaactgatgacctcaagattgggttcgctgcgtgtgcctacagatgtgtaatcaatggagctgccgacaagctttttaatcatatcttttttgttgtcatctgcgatgcccaccggcgtaatgccgagattgtgaacggcatccaagaatgaaagctcaagcacaaccacccgcttaggtgtgccgcttactgtcgtttttccttcttcgtcatggatcactctggaatccttagacttgcttccgccgcttccgttgttattctggcttgatgaacagccggatacaatgaggcaggcgagcaataaaacacttatgatggcaatcaacttgttagaataggtgcgcatgtcattcttccttttttcagatttagtaatgagaatcattatcacatgtaacactataatagcatggcttatcatgtcaatatttttttagtaaagaaagctgcgttttttactgctttctcatgaaagcatcatcagacacaaataagtggtatgaagcgttaccgtgtctttgagacaaaaacgcatgggcgttggctttagaggtttcgaacatatcagcagtgacataaggaaggagagtgctgagataaccggacaatttcttttctatttcatctgttagtgcaaattcaatgtcgccgatattcatgataatcgagaaaacaaagtcgatatcgatatgaaaatgttcctcggcaaaaaccgcaagctcgtgaattcctggtgaacatccggcacgcttatggaaaatctgtttgactaaatcactcacaatccaagcattgtattgctgttctggtgaaaagtattgcattagacatacctcctgctcgtacggataaaggcagcgtttcatggtcgtgtgctccgtgcagcggcttctctttaattttgatttttctgaaaataggtcccgttcctatcactttaccatggacggaaaacaaatagctactaccattcctcctgtttttctctttaatgttctggaatctgtttcaggtacagacgatcgggtatgaaagaaatatagaaaacatgaaggaggaatatcgacatgaaaccagttgtaaaagagtatacaaatgacgaacagctcatgaaggatgtagaggaattgcagaaaatgggtgttgcgaaagaggatgtatacgtcttagctcacgacgatgacagaacggaacgcctggcagacaacacgaacgccaatacgatcggagccaaagaaacaggtttcaagcacgcggtgggaaatatcttcaataaaaaaggagatgagctccgcaataaaattcacgaaatcggttttcctgaagatgaagccgctcaatttgaaaaacgcttagatgaaggaaaagtgcttctctttgtgacagataacgaaaaagtgaaagcttgggcataaagcaaggaaaaaaccaaaaggctatgacggccttttggtttttttgcggtctttgcggtggtattttgcagaatgccgcaataggatagcggaacattttcggttctgcatgtccctcaatttgctattatatttttgtgataaattggaataaaatctcacaaaatagaaaatgggggtacatagtggatgaaaaaagtgatgttagctacggctctgtttttaggattgactccagctggcgcgaacgcagctgatttaggccaccagacgttgggatccaatgatggctggggcgcgtactcgaccggcacgacaggcggatcaaaagcatcctcctcaaatgtgtataccgtcagcaacagaaaccagcttgtctcggcattagggaaggaaacgaacacaacgccaaaaatcatttatatcaagggaacgattgacatgaacgtggatgacaatctgaagccgcttggcctaaatgactataaagatccggagtatgatttggacaaatatttgaaagcctatgatcctagcacatggggcaaaaaagagccgtcgggcacacaagaagaagcgagagcacgctcgcagaaaaaccaaaaagcacgggtcatggtcgatattcctgcaaacacgacgatcgtcggttcagggactaacgctaaagtcgtgggaggaaacttccaaatcaagagtgataacgtcattattcgcaacattgaattccaggatgcctatgactattttccgcaatgggatccgactgacggaagctcagggaactggaactcacaatacgacaacatcacgataaacggcggcacacacatctggattgatcactgtacatttaatgacggttcgcgtccggacagcacatcaccgaaatattatggaagaaaatatcagcaccatgacggccaaacggatgcttccaacggtgctaactatatcacgatgtcctataactattatcacgatcatgataaaagctccattttcggatcaagtgacagcaaaacctccgatgacggcaaattaaaaattacgctgcatcataaccgctatcaaaatattgtccagcgcgcgccgagagtccgcttcgggcaagtgcacgtatacaacaactattatgaaggaagcacaagctcttcaagttatccttttagctatgcatggggaatcggaaagtcatctaaaatctatgcccaaaacaatgtcattgacgtaccgggactgtcagctgctaaaacgatcagcgtattcagcgggggaacggctttatatgactccggcacgttgctgaacggcacacagatcaacgcatcggctgcaaacggactgagctcttctgtcggctggacgccgtctctgcatggatcgattgatgcttctgctaatgtgaaatcaaatgttataaatcaagcgggtgcgggtaaattaaattaagaaagtgaaaaacacaaagggtgctaacctttgtgttttttaattaattaaaatgtttattaacttagttaaggagtagaatggaaaaggggatcggaaaacaagtatataggaggagacctatttatggcttcagaaaaagacgcaggaaaacagtcagcagtaaagcttgttccattgcttattactgtcgctgtgggactaatcatctggtttattcccgctccgtccggacttgaacctaaagcttggcatttgtttgcgatttttgtcgcgacaattatcggctttatctccaagcccttgccaatgggtgcaattgcaatttttgcattggcggttactgcactaactggaacactatcaattgaggatacattaagcggatttgggaataagaccatttggcttatcgttatcgcattctttatttcccggggatttatcaaaaccgggctcggtgcgagaatttcgtatgtattcgttcagaaattcgggaaaaaaacccttggactttcttattcactgttattcagtgatttaatactttcacctgctattccaagtaatacggcgcgtgcaggaggcattatatttcctattatcagatcattatccgaaacattcggatcaagcccggcaaatggaacagagagaaaaatcggtgcattcttattaaaaaccggttttcaggggaatctgatcacatctgctatgttcctgacagcgatggcggcgaacccgctgattgccaagctggcccatgatgtcgcaggggtggacttaacatggacaagctgggcaattgccgcgattgtgccgggacttgtaagcttaatcatcacgccgcttgtgatttacaagctgtatccgccggaaatcaaagaaacaccggatgcggcgaaaatcgcaacagaaaaactgaaagaaatgggaccgttcaaaaaatcggagctttccatggttatcgtgtttcttttggtgcttgtgctgtggatttttggcggcagcttcaacatcgacgcaaccacaaccgcattgatcggtttggccgttctcttattatcacaagttctgacttgggatgatatcaagaaagaacagggcgcttgggatacgctcacttggtttgcggcgcttgtcatgctcgccaacttcttgaatgaattaggcatggtgtcttggttcagtaatgccatgaaatcatccgtatcagggttctcttggattgtggcattcatcattttaattgttgtgtattattactctcactatttctttgcaagtgcgacagcccacatcagtgcgatgtattcagcatttttggctgtcgtcgtggcagcgggcgcaccgccgcttttagcagcgctgagcctcgcgttcatcagtaacctgttcgggtcaacgactcactacggttctggagcggctccggtcttcttcggagcaggctacatcccgcaaggcaaatggtggtccatcggatttatcctgtcgattgttcatatcatcgtatggcttgtgatcggcggattatggtggaaagtactaggaatatggtagaaagaaaaaggcagacgcggtctgccttttttttattttcactccttcgcaagaaaacggattttgaaaaatgagaaaatttcctgtgaaaaatggtatgatctaggtagaaaggacggctggtgctgtggtgaaaaagcggttccatttttccctgcaaacaaaaataatggggctgattgcggctctgctggtctttgtcattggtgtgctgaccattacgttagccgttcagcatacacagggagaacggagacaggcagagcagctggcggttcaaacggcgagaaccatttcctatatgccgccggttaaagagctcattgagagaaaagacggacatgcggctcagacgcaagaggtcattgaacaaatgaaagaacagactggcgcgtttgccatttatgttttggacgaaaaaggagacattcgcagcgcctctggaaaaagcggattaaagaaactggagcgcagcagagaaattttgtttggcggttcgtatgtttctgaaacaaaagcggatggacgaagagtgatcagagggagcgcgccgattataaaagaacagaagggatacagccaagtgatcggcagcgtatctgttgattttctgcaaacggagacagagcaaagcatcaaaaagcatttgagaaatttgagtgtgattgctgtgcttgtactgctgctcggatttattggcgccgccgtgctggcgaaaagcatcagaaaggatacgcttgggcttgaaccgcatgagatcgcggctctatatcgtgagaggaacgcaatgcttttcgcgattcgagaagggattattgccaccaatcgtgaaggcgtcgtcaccatgatgaacgtatcggcggccgagatgctgaagctgcccgagcctgtgacccatcttcctatagatgacgtcatgccgggagcagggctgatgtctgtgcttgaaaaaggagaaatgctgccgaaccaggaagtaagcgtcaacgatcaagtgtttattatcaatacgaaagtgatgaatcaaggcgggcaggcatatgggattgtcgtcagcttcagggagaaaacagagctgaagaagctgatcgacacattgacagaggttcgcaaatattctgaggatctcagggcgcagactcatgaattttcaaataagctttatgcgattttagggctgcttgaacttggggagtatgatgaagccattgatctgataaaagaggaatatgcgatacaaaatgaacagcatgatcttttattccataacatccattcgcagcaggtgcaggccattttgttagggaaaataagcaaggcatcggaaaagaaggtcaagctggtgattgatgagaacagctcactcgcgcctcttcctgcgcatatcggcttgtcccatcttattacgattattggcaatttaattgataacgctttcgaagctgtagcggagcaaagcgtgaaggaagttttgttttttatcacggatatgggccatgacattgtcattgaagtatcagacacagggcccggtgtgccgccagagaaaatagaagctgtgtttgagagaggctattcttcaaaggggatgaggagaggctacggtctggccaatgtgaaagactcagtgcgtgaactgggcggctggatcgaactggcgaatcaaaaaactggcggggcggtattcactgtgtttataccgaaggagaaacaaagggggaatccatttgattcacatcgcgattgcggaggatgattttcgagttgcgcaaatccatgagagattgattaaacagcttgatggattcaagattatcggcaaggcggctaacgcaaaagagacattggcgcttttgaaggaacacaaggctgatttgcttctgctggatatttatatgccggacgagcttgggaccgcgttgattcctgatatacgaagccgatttcctgaagtggacattatgattatcacagcggcaacagaaacccgtcatttgcaggaagcgctaagggcgggaattgcccactatttgatcaaacccgtaacagctgacaagttcaggcaggtgctgcttcagtataaagaaaaaaggaagctgctcatgtctcagccggaggtcagccaatccatgatcgaccatatttttgggaacagtgtgaagacagctttgccggcagagaatttgccgactggcattaattcgattacactgcgaaaaattaaggaagcgcttcagactgcgtcagaaggattgacagcggaggaacttggggaaaaaatgggggcgtcacgaacaactgcccgccgttatgccgagtaccttgtgtcaaaggaagaagcaagagccgagcttgaatacgggattatcggcaggccggagagaaaatattatttggcggcggattagatatgaaaaaatctataatcctattgattattctattgatctttactcagggtgatatcaggcaggcggctgcgccgcgcctgccggacgggccgatagaaattgtcgtccctgccgaaccttctggcggctgggatgtcacagcgcaggcgatccaatcagttttgaggcagaagcagatcgtgaaggatgatgttcatatcgtctataaatccggcggcgggggagagaaaggctggaaatatgtcaacaaaagcagcaaacaaaccatcagcatgacgtccagcttaatattgagcaatgatcttctcgggcaaagcaaattaaaaatggccgattttacgccgctcgccattctctccaaggaatggcagacggttgcattgccaaaaggatcagcgttaacaaatggcaaggatgtgctgaatgagatcaacatgcatcccggcaaggtgagaatcggctttgccccggggtttggcaatgatgatcagctctcgttcgtcagagcggcagatatgtacggcattgacccgtttgacattcaattctcacagtatgacagcagcgaacagctcattcaggcgctgatcagacatgagatagaagcggcttccatgaccctttctgaagcgaaaccatatgaacgaaacggcgatatcacgttagccgctgtaacatctgataaaagacttcccggttttccaaatgtaccgacgtggaaggagcagggaatcccgtttgttttttctcattggagaggaattttgggtccgaaaaatatgtctgaggaagagatttcttactgggatcaagcgctaaagaaggtcacctcttcacctgaatggaggcggaaaataaacgaacaggactgggaaagcttttatttaaacagcagggaaacgaaacggtttttagaagagcaatctgctttttatcaaagcatcatgacaggaaattaagatcccggcatccccgggatttttttcatgccgaaaattgatcaaaaagaacaaaacggttttaaaaaattaaaaatacaaaaaaaacaaattatttacttgcggttggttttcccatacgatggcaaaaaggcaagacaaaaaggggagtaagggagaaaaaaatgtaagcggattcatttaagggggaatggatgtgttagcaatcttaggctttctcatgatgcttgtgtttatggcattgatcatgacaaaacggctttctgttttaacagcattagttttgacgccgattgtgtttgcgcttatcgccggatttggatttactgaagttggggacatgatgatttcggggattcagcaagtcgcgccgactgcggtcatgattatgtttgcgatcttatattttggaattatgattgatacaggcctgtttgatccaatggttggcaaaattttaagcatggtcaaaggagaccctttaaaaattgttgtcgggacagcggtccttacaatgctcgtcgccttggacggagatggctcgacaacgtacatgattacgacaagcgccatgcttccgctctatttgctgctaggcatccggccaattatcttggcaggaatcgcgggagtcggcatgggaatcatgaacacaattccatggggaggtgcgacgccgagggcggcgagtgcgctgggtgttgatccagctgagcttacagggccgatgattcctgtcattgcaagcgggatgctttgtatggtggcggttgcgtatgtgcttggaaaagcggaacgaaagcgccttggtgtgattgaactgaaacagccagccaatgccaatgaaccggcggctgcggttgaagatgagtggaagcggccgaagctttggtggttcaatttattgttaacgctttctttaataggatgtttagtatcgggtaaagtcagtttaaccgtactgtttgtcattgcgttttgtattgcgctgattgtgaattatcccaatctcgagcatcagagacagcgcatcgcggcgcattccagcaacgtgctggctatcggttcaatgatttttgccgcgggggtgttcacggggattttgacaggcacgaaaatggttgatgaaatggcgatctcgctcgtgtccatgataccggaacaaatgggcggattgatcccggcgattgttgccttaacaagcggcattttcacattcttgatgccgaatgacgcgtatttctacggggtgctgccgattttatcagaaacagctgtcgcatacggtgtggataaagtggaaattgccagagcctctattatcggccagccgattcatatgctgagtccgcttgtgccatccactcatttgcttgtcggactcgtcggagtttctattgatgaccatcaaaaattcgcattgaaatgggcggttctcgcagtgatcgtcatgacggctatcgctctattgatcggtgcgatctctatttccgtatgataattcaggcgtaatgacacacactaacggcatacaacattccggaggtgtcattatgagtgatccttatatgccgctgacttcagtcagaagcggaacggggttcgaagcggcaaaaggggtgcacggcctgactgtgcaaattgcgaatgtctattttattcagctgccttctgaacctcactcatttgttttaattgatgccggcatgcctcaatcagccggcatgattgtcaatgaagccaaacaaagattcggtgaagggtttcagctgaaggcgattatcctcacacacgggcactttgaccatattggggcaatcgaagagatccttgagcattgggatgtgcctgtttatgtccattctcgggaaatgccttatgtaacaggtaaaaaggattatcctccggctcgtcctgacagcaagagcgggctggtcgctaagctgtcgccgctgtttccgcggcactccatcgatatttcctcacatgtccaggcactgccggaagacggttcagtcccttttcttgacgagtggatgtggatcgcgacaccaggacacacgccgggccatatttcgttattccgcgatgacggccgcgtgcttgtagcaggtgatgctgttattacagtggaacaggagaaaatggctgacgtcttgatacaaaaacaggagcttcacgggccgccggcttatttcacgcctgacacagagacggccgcggagtccattctaaagctggccggtcttgaaccggaagcgttattgacagggcacggcataccgatgaccggcaaaaactttcgaagtgacttaactgaattggcaaatcggttatcgtctatttgacacccgcaccacgcgggtgttttttattgttttccaggaagttgcagaaaaatcatttgtcttgccgcttaaaaacgatacaatgaaaagcatgaagtgatgtgaaggggagagtttgttggaagaaaaagaaatactctggaacgaagcgaaagcgtttattgccgcatgctatcaggaattgggaaaggaggaggaagtgaaagaccgtctcgaggacattaaaagtgaaattgacctgaccggaagctatgtacatacgaaggaagagctggagcacggagcgaaaatggcttggagaaacagcaaccgctgcatcggcagattgttctggaattcgctgaatgttattgacagacgagacgtccggacgaaggaggaagtgcgtgacgccctcttttaccatattgaaaccgccaccaataacgggaaaatcagaccgaccattacgattttccctccggaagagaagggtgaaaagcaagtcgagatctggaatcatcagctgatccggtacgctggatatgagtcagacggagaaagaatcggcgacccggcttcctgttccctgacagcagcctgcgaagagctcggctggcgcggagaacgaacggattttgacctgctgccgctcatttttcgcatgaaaggcgacgaacagcctgtctggtatgagctgccgcgttcacttgtgatcgaggttccaatcacacatccggacatcgagacgttttctgatttggagctgaagtggtacggcgtgcctatcatctctgatatgaagcttgaggtcgggggcattcattataatgccgcgccatttaacggctggtatatgggcacggagatcggagcgagaaacctcgcagatgaaaagcggtacgacaagctgaaaaaagtagcgtccgtgatcggcatcgccgctgattacaatacggatttatggaaggatcaagcgctagttgaattgaataaagctgtgctgcactcgtataaaaagcagggtgtcagcatcgttgaccatcatacagcggcaagccagtttaaacggtttgaagaacaggaggaagaagcgggcagaaagctgacgggggactggacgtggctgattccgccaatttcacccgctgccactcatatcttccaccgatcctatgataactcaatcgttaagccgaactatttttatcaagataagccttatgagtaaacaatagaaaatcgatgatggccttcaaggctgcgggattcagtcacagagatgtcggtaacctttgagaaagggcttccgttctttacagcctcaacaaacgattgcagggcgttttccggaccctctgccaaaatctcgacacgcccgtcatcacggtttttgacccagccggccagttttcgcttatcagcttccatttgaacaaaatagcgaaagcccacaccttgaacccggccgtctacaatgattcggtattgaagcatgtaaaaaccaccttttctttttatgataatcaatcattttacaacctgtaaaggggatgtgtttgtatgaaaccagagcgctattcagttctttctcttaatctgggaaaaccgcagacgcttgaatatgacggaaagaaaatcgataccggcatcatgaagcgtccggctgaatcagccgtcatgctgtatcgggagaattttgaaggagacggacaggcggacctcgtcaaccacggcggacctgataaggctgtctgtgtctacccggcggagcattatccgttttgggaagagttcctctcaagaccgctgtcaaatgccgcatttggagaaaatctgacggtcgcgggcctgactgaggagaatgtttgcatcggggatgtgttcaggcttgatgaagctgttgttcaggtcagccagccgcgccagccgtgtgtaaagctggcgaaaaagtttggtgtaaaagaaatggtgctgaaggtccagcaaaccggctatacagggttttattttcgcgtgctggaggagggcagggtgtctcccggcgcgaaccttgaattgctgtccagaggagagaagggcatatccgtccagttcgccaaccgcatcaactaccatgatgcaaaaaatctcaccgccattgaacggattttaagtgaggctgcactatcggaaagctggagagcgtcctttatgaaaaaaaaggacaggctgctgccggttgaatagaaaaaagccgcgcatatcaacgtgcgcggctttgccatatttaagattgttttttctttgtttcaagcaggttggcaagaaaataggttttatagctttgaagctttcttccctcatggtgcgtgatcccctgcttttttagttctgccacataccagcctttactgccgtaatgcatgtcagaaaactcctttccctatctgatttcgaaacgattggcattgtaacatctataaaaagatgctgaaaagagatgcggggaaaactgagcctttcgaactagatgtgcgaatgttcttctgtatgtatatgcggagcaaaagccgaatatgatttaatggccggttagtttgatcatgacaacgccaaatgtcataatggcgaaaacaatgccgatatatgtgagcatcccgttttttttcttaacgccgtaaacggttataatgatgccttcaatgaaaaaaatgatgccgaaaataataaaccacatgcagataaaggctcctttcacagacataatagtagtgtagcatatctgaaagagccgggctgtgataatatcaagaaagccgggcgcatatcgcccggctcatgttttattgtttatcaaccaatttgaccagaagctgtgccaaatgttctttctcatcttcgtccgcaacgctccaaagctcttgcagcagcatttcttcaccgttttgcggctcttcatgctttgcgaggtagtctcccaggatcgcagcgctttttacaagcttgccgtcatccaatcccagctttttgcctcggttgacttgttttttcaggtagcctttaaattcatcaaagtcttttaaaatgtcttcttttattgtgccatgcatcgcgttcatttcgttttcaatttggattttttcttgatctctgttcattgcaagacctcctcgtgcagaataatgatgttttacctgctattggaggaggttaaacctgccggaagcccggaatgtgttttacagtttcgtcaggataatcggttcatcttttgtgatgacgatcgtgtgttcaacttgggcaaccatgcttttatccggcgtcttgaacgtccagccgtctccagcttcaacaatcgtttctgctttcgttgaaataaacggttcaagcgcgatgactgtgccatttttgaacagtgcgttatcaaacggatcataatagttcatgatgtggttcggcgcttcatgcaggcttcggccgattccgtggccggtcagggttttgatgacggtaaagccttgagagcgtgcttcatgataaacggctcttccgatctggttttggcgcttgcccgcttttgcctgctgaagccccttttgaaaagcgttttccgcgcattggcaaagcttatgaaggcgttcttctccttcaccgagcacaaatgagatgcctgtgtcggaatagaagccgccaaattcagcggagatgtcgatgttgacaaggtcccctgcttttaaaattttggatgtgcttggtatgccgtgagccacttcatcatttacgctgatacatgtcacacctggaaaatcgtattccttctcaggagctgaaacggcgccgtgctcatcaagcacagcttttccgataaggtcaaggtcttttgtgctcatgccgggctctgccttccgcttcatttcttcacgcgcaagcgcgacgattcttccgatttttttcaggccttctaattcttgatcgtttgttacaatcatctgtcattcccgctttctttttaaataatctagattaagcttaccacaactgtcttaaaaataggaaacacacggacctgggaaaaaagaaatacccccgggaaaattggtatagatcactagatatcttatatggtatatttgaaaaaaaagggtatgaggggatgggtatgctttcatttttacaaaaactcgggaagtcatttatgctcccgattgcggttctgcctgcggttggaattatccttgcgcttggcagagaggatgtatttaatatcccgtttgtctatcaggcggggacggcggtttttgatcatctgccgcttatttttgcgatcggtattgccatcggcatttcaaaagacagcaatggggccgcgggtttatcaggggcgatatcgtatctgatgcttgacgcggcaacaaagacaattgataaaacaaataacatggcggtgtttgggggaattattgccggtttaattgccggttacacctataaccgcttcaaggataccaagctgcctgaatatctcgggttcttcagcggcagacggcttgtgccgattttaacagccattattacgatcattttagcgggcatattcggagtcgtctggccgccgattcaatcgtgtatcaactcgtttggagagtggatgctcgggctcggcggcatcggggcaggcatattcggccttttcaacaggctgttaattccgcttggccttcaccatgtgctgaacaatattttctggttccaattcggagaatataacggagtgacaggggatctggcgcgctttttcgcgaaagatccgacagcgggcacatatatgaccggattcttcccaatcatgatgttcggtcttccggcggcgtgtctggctatgattgtgactgcgaagccgtctaaacggaaagcgacggctggaatgatgattggatttgctttaacagcgtttatcacagggattacggagccgattgagtttgcatttatgtttttatctccgcttttatacgctgttcacgcggtcttaaccgggttatctttatttatcgtcaactggctcggcatccgttcaggcttctctttttcagccggagctatcgattatgtgctcagctatggaatcgcagaaaaaccgctgcttctgcttttggtaggtatatgctatgcggcagtatactttatcgtgttttatgtactgattaaggctttgaatttaaaaacgcctggacgggaagacgatgatgtggatgaagtgctggatgaaaatactgttcaggatgtaaatgaaaacatcatgctgaaagggctcggcggaaaagaaaaccttcaaaccattgatcattgcgccacaaggctgcgactgactgtgaaggataccgctttggtggatgaagcgctgctaaagaaagcaggcgcaaaaggggttgtcaaatcaggggggcaatcggttcaagtcattattggcccgaatgtggaatttgcggcggaagaattgagggctgctgtcaaataaaaaaagcggagagggcaacctctccgctttttcttatttatcttcgttatcctttgacgtttcggaagaatcttcgtcatgttttgtgtaatcataatcagaaggattcaccttcttaaaacctttcggctcgtagaaccgcagcaggtctccgtttatgattttatcggacatttcaagttccttcttgacgagcgagtcttctgacttgtcgacttcggattcatcgagttcttttccggttttcgtgtcgtaatacttaccggatattttcgtgtacttcggtgaaataaagtctccgtttcggaacggaatcacttcacggtgttctttcgataaaatatcagaaccggacatcagatagtccttcgtatccactccgagcagatgcagaatggtaggagccacatcaacgtctccggcatatttatgaactttctcgcccttcacgccggcagcgtggataaagagcggcacccgttgaagctgggcgttgtcgtaatcagtgatttcatccttgccaagcactttcgccatcgctttattgtggttttcagagatgccgtagtggtctccgtacatcacaataatcgatttatcatataacccgtcttttttcagatcattgaagaattgttcaatggactgatcaaggtaatgggctgactggaagtagttatcgacgacagagtcaccaaagtctccagccgggaagtctgtatccccctcatccattccgaatgggaagtggttagacagggtaatgaacttcgtatagaacggctgcggcaggctttccagcagcggcattgattctttgaagaacggtttgtctttcatgccgtagtttttcgtgttttcttcgttcatgtcatagtaagcagaatcaaagaatttatcaatgccttccgccttgtacatttcgttacggttccagaacgtctgcgtgttcccgtggaaagtagcagatgtgtaattcttagacttcagaatcgccggaacggattgcagcgtgttttgcgctttgtttacgaaaactgaaccttgagccagcgggtacagagagttttccatcataaattcagcatcagatgttttaccttgtcccgtttggtggaaaaagttatcaaagtagaacgtttcgttatcatgtgccagtttatttaagaacggtgtcacttctttgccgtcaattttatagtcgatgataaatgactgcaaagattcaagtgaaacgtaaatgacgttttttccttccgctttgccgaaatacacgttattcggcacatcgtaattggctttcatgtagttttccacttccgtcacgtcgctggaatcggcaagcgcgcgctggctgttggacttgatattctgtacagcgtcataaatcgtgaaattgtatgttcccaagtatttcacaagatagttccggtcgaatgatcttgtcagcaattcaggacggtctgattccgcaactgccagattgatcaagaacacaagaattgaagacgcaaaaataattcggaacgattttttgcttgacgtttcggcaggcttgtttactttgatcgccaagatgatcaggatgatcgtatcgataaagtaaaaggcgtcagtcggtctcatcagcgaaaatgcgctgtcaccgagttggccgccgtttgttttagcctgcataatgaccggaattgtaataaaatcattgaaaaatctgtagtacacaatgttggcgtacagtaaaaaagacattaaaaaatgaatcactataatggctgtctgctgtaattttttcttgaacaagagtccaaagccaagaaagaacaagcttgagctaagaggattcacaaaaagcaatattttttgtatcgtgttgtctattcctaagttgaagttcaggacataaccgacatacgttttgatccataacaggacgaccgcgattaagaagaaggccagtcctctttcttttataaatgttttcattgttacactccttttttccgatccagttcgagcgaaacgatagaaaaaacgaacgtatccaatataacacgaatcagcagattagaaaagtgaaaatcgtatgatggagaaagtggcgaaaaacgccgtcgaatcaacgtttcgctttgatattaccaaatgtaaaacaaggtatctttctagaaatagaggaataaaatggtacattgggaattgtatgataaaatataaggtatagataaaaagaggtgaaatgatggatttttcccatattgtgtctgaagataaaattaagcgcgccatcaaagacggggactttcaaaacctcccgggaatggggaagccgctgccgaaggatgacgcggcacacttgccggaatcgctgcgcatgggctatcgtattttgaaaaacgcgggaatggcagaggacgagggcgcgctcaaaaaagagcttatgaccatcgaccatttaatcgaaaagtgctatgacgaaaaagaacgcgagcaattaatcagaaaaaaatctgaaaagcaattgctgcttgataagcttgtcgacaaaaaaggcatgttttcaaagccagcatccgctttttataagaataaagtatatgatcggcttggacgaaacagaccttcttccagctgatttgtcttgtctgcaggatggcgattgataatagccatcctttttatgttccaagttctatgtcaaaaggtttatgtttttccatctatgggaaatgattcataaacgaaaaaagggtgatgggatggaacgactattagtatggatagagcatatatctgattggctgtggggtccgccgctaatcatcctgctgacggggacgggcttgtatttcactattttgctgaaaggttttcaatttcgctatcctttatacattttcaaacagacaatcggcagcgtaggaaaaaagccgaagggagagggcacagtcacaccgcttcaggcattgacctcagccctcagttcaacgatcggtgcagcgaacattgtcggtgtgcccgccgctattatgtttggaggaccaggagcggttttttggatgtggcttattgccttatttgccatggcgattaagttttctgaaagtgttcttgctgttcattacagagaaaaaaatgagcagggtgaatacgtcgggggaccgatgtattacataacaaaagggctgcgcatgaaatggctcggcgtattcttctctgttgcgctgattgtggagctgatcccaagcattatggttcagggaaattcggtttcagtctcgcttgccgagacgttttctttcaataaaatatacgcaggaatcggaattgcatttttgattgggttagtggtgataggaggggtaaagcggatcggaaaagtaacagagtttgtcgtgcctcttatggcaggggcatacgcaggtgccggtctcctgattgttctcatgaatctatcatcagtgccggcgtttttctctctcatcttttcaaatgcgtttacctcttcttcagcagttggagggttcgcaggtgctgcgttggcggaaaccgttcgctggggatttgcccgcgggctgtattctaatgaagccgggatgggaacagccccgattgcacatgcggcagcaatgactgatcatcctgtgcggcaagggttttggtctgtgatcggcattgtcattgacaccttgatcatctgcacgaccaccgcttttgtcgttcttgcatctggtgtctggacagggaagaacgcctcaattgacccggcagcactgacgacggctgcatttcagcattatttcggttctggcggagggtacttcgtttcggtttccctagtcttctttgtcgtatcaaccattatggttgtcattttttacggcgtaaagcaagctgaatttctgttcgggcggctggcaggacacgtgattaaattcgtttatttagcggctattatcattggtgccgcaggcggagcaaaagccatttggggctttttggacttagcattggcttttattctcgttccaaatgtgattgcgctgttgttattgagcagaaaggtaaaagcgctgtacaccgaattctttacatctgaacagtactacctgaaagatataagaaaaacaaaacagaatcctgtttatcaaacaaaagaaactaaaaattcctagtgctttgctttggcgctgaacaacgctttgctttttatgatcaaataaatgagtaaaggcagcaaaagagaaatcactacattaatgattggtttgattctgttaaagtcgattagctgatttgtatttaaaaagaaccaaaagccgcatacgactgagaacatgccggttggtgtatacatggctttcgggtcgatttttgagtgtaaaaacgaaaggccgtataccacgatatatagggaacctgctatcttcaccataatgactggaatccaaaaagccgcgatgatcaggtctgagcgatccagaaaatccgtaatgcggatctgcctgatgaccatataagcaggatcaaagaaagtagatgtcaggttgggaccaaagacagaaattgaagaaaataacatcacggccagcaataaagcgcccagcagtatcgcgaaaatggtgtattttagcgggacgctccggtttgagaagagaagcggaaggataatcaattcccccattgtcccaaacgcgtaatagcctgattgaaggtatgggattagaccttcaaaaacaggtgtcaagttttgaagctcaatttgtgtggccagcgtaaatggaaggcacaagaccaggatgccgaatggaaataggaatatctgcgccattctggtcaatgtttcttttccctctctggcaatacagatcgccacaaagataataacaccgccaagaacagccattggtgttcttgggagaaataaaatgttaatcaaattgatgaaaaaacgtatatcatgagcattgattaacaggaaatacaaagaaaacagtaaaatgataatccggcctgcgattggtgaggaatcgctcagcagctcatagatatttttatcctgatgctttttcatcagcctatgcatgagccagagtgccggaatcacgaggacaacgccgaggatgtagctgtgccaggcattttgtttagctgattcgatcatgagaatcggagcatgctttaatccgactgctaacgtatacagagctccgaaaaataatccttggtatgcagaggtcttgtccataaagcacatcctttctgtcatgttcaaaacggaatatatttaaacaggtgccccagccgcggaagcaggggattcactctcatataaatccatagaaaagcacttcctgcaatcagcaggctgaaggcccattttgttagattgttagcggaacgaaaattcttccattcatatgcgtatatggcaatgcacacaatcaatgtctgtacgatatagctgatcatgctgacgcacctccattaatggctgatcgttttgtataggacaccgccctgctcaatcgtcacaattgggacgacgtgaacctccatatccttatatacctcttcccattcctttttcagcagattcttcgtggttgccgtgcttctgatggtcctgtcttgaaagccggccgggtccgcctttagcttttgcaaacgatgaacggtgctgatcacgtccttctttatggttctgtttagtgctttttgaatgatgtaatactggtcattttctctcgtctcataggttgattggttttccataataattcctttggctctgatctcgattgtcattgacagctttccgtttttttcagcggcatgaaaggatacattggacttttgaagctgaatggatgcttgtcccatttgattcggcaggtctactatgaattctggctggcgggcttgattcagcaacatcagggctgctgtcatgtgtacatctttgaaaatatccatcaatctgtcctttttaaagatcgcaagcccgtcaattttcaaattagatttgcctttccctccaggttttgttttagatgcagagatgaccggtgcatacggatcactgcctatttctactagatcagacatgaatctgcttaagaaaacgggccggctcgttgcgataatggccagctcccgaatcatttccgccggaaactgttcaagctgaacatcggtgtttaaaatgtcccgcgcttctccccggctgactaaaatgagcgccgttaatctgttctgcggatttcgcgttaaaatatcaaagactggggcaacgccgtctctcgccatatcctctccaataatgactgtacgtctgtgggacgtattgattgtccgtgacaaggaggtttgcagcttgttgttcgcttctctgatcgtagtgccggaagctgaatcaacataccatgtttttgaaccggcagttccgccgccgccccctgtttgtccgcctaattgaccgaccaagggaatctgcatggccactcgatactgatcttttttcttatcaatggctgagctgacaacaaatgcaatgtcattgatttctgtccggtcccagcaccccgttagaaggatacaaatgagaagcggcaaaacacacttatatattgttttcttcatcttttgggtcctctcttttcgctcccttctgtccgttgccgcgcgaatacgtgcccggccttctggtcatcgtccaccaaggcgccctgacaaaaatatcttttacttcatctcgtttaaacggagaaatcccggataaataaggaataccgaaagattgcagcttgcataaatggagcactaagataatcgtgccaagcataatgccgaaaatcccgaaaatactcgccaaaaacataagcgggaaacgaagcatcctgatggagatagctaagttaaaccgcggaattgtaaatgacgcgatccctgttaacgatacgatgatcaccatgggggcagacacaattcccgcttcaacagcggctgtcccaatgactagggccccgagaatactgacggtctggccgatggttttcggcaggcgcactcccgcctcacggagagcctcaaaagaaatttccataatcaatgcttctatgatggcggggaaaggaatcggttcacgagcggaggccacactgaacattaagtttgtcggcattaagtcctgatggtatgtaataacggcaacataaatagccggcaaatataaagcaacgaataaaaacatatagcgaagccagcggattaagttagacatcaaataacgctcatagtaatcttcactggcctgcataagctgccaaaacgtaatcgggcctgttaagacaaagggcgtattatctgtgaaaatggcaaatcggccttcgagaagctgggcggcgacagtgtccggcctttctgtgtattgcagctgggggaatggcgagtacgtgtcgtcttcgataaactcttcaatatatccgctttctaagacagcatcaatctttatctttttgattcttttttttactttgtcaatgacctttggatcggcaagcccgtcaatataggccaagacaacatcggttttggttttcgtgccgattttaaacgagatcattttaagctgaaacgttttgacgcgaaagcgcacaagagcggtattgaccctgaggctttcagtgaagccctctcttgaccctctgatggtcgattctgttatcggctcttcaatgcttcttctttgtccgccttttatatttaagatcaggccttttgagtgcccgtcggcaaataaaaccgcgttcccctcaatgatagatgcagccactttactcatactcgtttctgttgcaacacttgaaattgatagagtattttgcagcgcctcttcatgttcatctatttgatccgtcaaatgcgttaagaaagggcggagggcgtgatcctgaatatgttcagattttacaattccttcgatataaacaataaatccgcacagcccgtttccaaagtcaaattgtctaaatacgatgtctgagcagccttctgttaataaggtcagattatcgaggttttccttcaaattgggagagatcggtctgtcctgattgtcttcaagctctttgatgagctgaagcgctttgtcgcgtttattcatagaggctcaccctgctttttaatgtcatattcaataagtgcttgtgacttttagggtaaccttgtctgtttcatatattccagactaggatgaaagcgctataaaaaagtgttgactacctgtatatacaggaatacaatatgattataagttgtatatacaagttataaaaacggatacggaggggttggcatgggggaactgaacaaatcggcacgtcagattgtcgaagcagtcggcggtgctgaaaatattgcagcggcaactcattgtgttacacgtttgcgttttgctttaatagatgaaagcaaggttgaccaagagatgcttgatcaaattgatgcggtaaagggatcattctcgacaaacggacagtttcaggtcgtaatcggccagggaactgtcaataaagtatatgctgaactggttaaggaaacggggattggcgagtcaacaaaggatgaagtgaagaaggcctcagaaaaaaatatgaatcctttgcagcgtgctgtgaaaacgcttgcagacatttttattccaatattgcctgcgattgtcacggcgggtcttttaatggggatcaataacattttaacggcggaaggcattttcttcagcacaaaatcgattgtgcaggtttatccgcagtgggcggatcttgctaatatgattaacctgattgcaggcacggcctttacgtttttgcctgcgttaatcggatggtctgcagtcaagcggttcggcggcaatccgcttctcggcattgtgctcggggttatgctcgtgcatcctgatttgctgaatgcgtggggatatggcgcggcagaacaaagcggagagatcccggtatggaatctattcggcctagaggtgcagaaagtcggctatcagggccaggtgctcccaattttgcttgcttcttatatgctggcgaagattgaggtatttttaacaaaacgcacacctgagggcatacagctgctcgttgtcgcaccaattacgcttctcttaacgggatttgcctcttttatcattatcggcccgattacatttgcgatcggtaatgtactgacttcagggcttatctcggtgtttggttcttttgccgcactgggcggtctgttatatggcggtttctactcagcactcgtgattaccggtatgcatcacacgtttcttgcagtcgacctgcagctcatcggttcaaagctcggcggcacctttttatggccgatgctggcgctttctaatatcgcacaaggttcggcggctctggccatgatgtttatcgtgaaggatgagaaacaaaaaggcctctccctcacatcagggatttctgcttatcttggcattacagagcctgccatctttggggtgaatctgcgatacagattcccgtttatcattgcaatggtcagctctggcctggccggaatgtatatttcttctcaaggtgtgctggcaagctccgttggtgtcggcggcgtgccggggattttctcaatcatgagccagtactggggcgcgtttgcaatcgggatggctattgtattgatcgtgccgtttgccggaacatacgcgtatgcgagattcaaacataaataacaaatggggagcgggacgtgttgaacgttcccttttcccattttcaatttaaatatggtggtggagacagatgaaaacagaacaaacgccatggtggaaaaaagctgtggtttatcaaatttatccgaaaagctttaacgatacgacgggaaacggtgtcggcgatttgaacggcattattgaaaagctggattacttaaaaacacttcaggtggatgtgctttggctgacgccgatttatgattctcctcagcatgataatgggtacgatattcgtgattattactcgatttatcctgaatatggtacgatggaggattttgagcggctagtgtccgaagcacataaaagagacttgaaagtcgtcatggatcttgttgtcaatcatacgtcaacagagcacaaatggtttcgcgaggcgatctcttccatagacagcccgtatcgtgatttttatatatggaaagacccgcaggaaaacggttctcttccgacaaactgggaatcgaaattcggcggctcggcatgggagcttgacgaagcatcgggccaatactatttgcatctgtttgatgtgacgcaggctgatttgaattgggaaaatgaagaggtcagaaagcatgtctatgacatgatgcatttttggtttgaaaagggaatagacggctttaggcttgatgtcatcaacctgatttctaaagatcagcgctttccgaatgcggaggaaggcgacggccgctctttttacactgacgggccgcgggtgcacgaatttctgcatgaaatgaacgaaaaggtgttttcacattatgacagcatgacggtcggtgagatgtcttcaacaaccgtagaccactgcatccggtatacgaatcctgacaataaagaacttgatatgacattcagcttccatcatctcaaggttgactatcctaacggcgaaaaatgggccttggcgccgtttgattttttgaagctgaaggagatcctatctgactggcaaacggggatgcacgcaggaggaggatggaacgctctgttctggtgcaatcatgatcagccgcgcgttgtatcaagatatggagacgatggcgcatatagggtgaaatcggcgaaaatgcttgctacggccattcatatgatgcagggcacgccttatatttatcagggcgaggagctggggatgacgaatccgaagttcactgacataagctcctatcgggatgtcgaatcgctgaacatgtataacgcctttaaggaaaaaggaatggctgatcaagatattacagccattttacaggcgaaatcccgtgacaattccagaacccccgttcagtgggatgctacggaaaatggtggttttacaacgggcacaccatggataccggttgcaggaaattaccgggaaatcaatgctgaagcggcgctgagggatcagaattcggtgttttaccattatcaaaaattgattcagattcgcaaaatgtatgacattgtgacagagggtacgtatgagataattgcaaaggatgacccgaacatttttgcgtatctcagacacggcagcaatgaaaagctgctcgtgatcaataatttttacgggacagaggcggcctttacactgccggactctttagcgcctgacgaatggaaggcagaggtgctgttgacgaacgatgaagcaagggaagggcttcagaacatgacgcttcgcccgtatgagtccattgtttatcgtttaacgaaaccgtgttaaactaagctgggtggtccataatgaaggtgaataaattcatcacaatttataaagacatcgcacagcaaattgaaggcggccgatggaaagcggaggagattcttccgtctgaacatgagttgaccgcacagtacggtacatcaagagaaacggtccgaaaggcgcttcatatgctcgcgcaaaacggttatatccagaaaatcaggggaaaaggctccgtcgtgctcaatcgtgaaaaaatgcagtttcccgtttcgggccttgtcagcttcaaggagctcgcgcaaacgcttggcaaagaaacgaaaacaactgtacacaaattcgggctggagcctccgtcagagctgatccaaaaacagctccgggccaatctagatgacgacatgtgggaagtcatcaggtctagaaagattgacggggaacatgtgattttggacagggattattttttcagaaagcatgtccctcacctgacgaaagaaatttgtgaaaactccatatatgaatatatagaaggagagctcggtctttcgatcagttacgcccaaaaagaaattgtcgccgagccgtgtacggacgaggacagagagctgctcgatttacgcggctatgaccatatggtcgtggtgagaaactacgtctttttggaggataccagtttgtttcaatatacggaaagcagacaccgtctcgacaaattccgatttgttgattttgcgcggcgggggaaatgagagaggcgcctgcctgcggcagcgcgcttttttgtttggtatcaaaattgatactatccaacaaaaatgtgcgtacttttactttttatcataatggctacaatagagatgtgagtaatctaaaggagaggtgttttacatggcagatctaaagacacaaattctggatgcatacaatttcaggcatgcgactaaggaatttgacccgaataaaaaagtgtcagacagcgattttgaatttattttagaaacaggaagactgtctccgagctcactcggccttgagccttggaaatttgtcgtcgtccaaaatccggagttccgcgagaagcttcgtgaatacacatggggcgcgcaaaagcagctgccgaccgcaagccatttcgtcctgattcttgcgcgtacagcgaaggatatcaaatataatgcggactacatcaaacgtcatttaaaagaagtaaaacaaatgccgcaagacgtgtacgaaggctatttaagcaaaacagaagaattccagaaaaacgatttgcatttgcttgaaagtgacagaacattgtttgactgggcatcaaaacaaacctatatcgcgcttggcaacatgatgactgccgctgcgcaaatcggtgttgattcctgcccgatagaaggcttccagtacgatcacattcaccgtattcttgaagaagaaggccttctggaaaacggaagcttcgatatttctgtgatggtggcatttggctacagagtgagagaccctcgtccgaaaacaagatctgctgttgaagatgttgtgaagtgggtttaaataaagaaagctgctcgctaagcgagcagctctttttttatgcctgattcgctctattctgttttctcctctgatgtaagtacattgccgttccgagtgcgctgataagaaatccggccaataggatcgagtacatggatgtggctgtgtccggaagcaggccgccagccggaccgtctgttcctgatccgcccgaaccgtttcctccagagccgttagtcggttgagtgccaggaggcgtatcatttcctccgtttccgtcagttggctgttttccgcctggtttgtcggagccgccgccatgattgccgtcatcaccgcctgtcggttggtcggacgggaatgccggcggtttgttgttcgaaccggaatttaagatcgtgtattcgctgaagtggtttgtatatcctgtcaccatatcatcgtcaactgatccgttatctgtctttgtgaaagctttctttttcctgtcgacatgataaatggcagggttatgggcttcttcaatatcaaacatgcgaagcgaaagctgaacgggctccttgaatgattttatttcttttcctttttgctttactgtaaagtcatatacatctgccaatgacacattcaattctcccgtcgacttgattccgattgcagtgtctgcagttttaaggttcgccattggcatcttcatgctgtaccagtagttgaacaccgtcaatgaaggatctgactctctttctttcaaaagtttgacctgatctttttttactttgagattgataggcttctcttgagatccttcatgtgttccataatagacaaatggcgtgttggcatttttagcgtaaatcgcaaatttgtcttcatcaagtgtccagctgccgtcctcctgctttgtcggcaggaatacttctttgatccgtccttcaactttaggagagaccttgtttcctagttttttcagctgttcggtgaaaatctcataatcaacgtagccaaggtcttcaccatgggaggcttctgtaaagacagaatatccgtctcctccggcaccaacaaaattatttgttgccacgcggtaggtatcatccgtatttatagcaactttgtctccgttaggcgattcaattttcacttctaacacacggtgtccaggtttgttgtttaatgtaaaggtatattcgattccggccacctgagggaaagcgccgccgccattttccacattgcttaggccttgttcaagggcttctttaatttgttttccggttaaatcggccacgtaaagcgtattgccgaacggcatcacgttgagcacctcgccgagtgtgatatcacctttgtcaatgcctgctctgatgccgccgccatttgttatcgctattctggcgccggctgcttctttcgcttttgccagcataccgtccgcgatgaagtttccgagattcgtttctttcgtgcgcacatgctcacgctggccgtcaagcgccacatccgtgtagccgactttttcattttttacgtcctctaattcatttttgaactgatcgagctcttgttttgcttctgggttttcttctgtatgttcatcaattggcagcacgctcagatttgatttatctgtttgcacaacgcctttttcatcaaacgcgacatcaacgcgccccaagaattggccgtattcttttgcctgtgccacgatcgtcggttcttcgttgtttacgacctccattttgtcaacgagggtgtgagtgtgtccgccgatgatcaagtcaatgccttttacttttttggctagctcaagatcacggttatgaccgatatgggttaaagcaataattttatttacctgttcttcttcctgaatcgctttgacggtgttttgggctgtttcaaaggcatcattgaatacgatgcttttgcccgggcttgatgtggtggctgtatcttctgttgtcaggccgaatacggcgactttctccccgtcaacgtctaacagaatgtaaggatggatgccggcctccttcttttcacctgccgtaaaggtttgcggctttttgacaaatgatttcagcttggactcatttgtcacatctacgtttgcactgacaatcggaaattccggcgcttcaaagtgatagcggttcgccggatcaacggttgcgctgtttccgcttagaaaatcagaaagcactgtcgggcctttgtcaaattcatggtttccgaaggtcatggcgtcatagcccatcatgttcatcattttcagatcggccaaaccgttccatttagtaaaatacagatcgccggaaaacacatctcccgcatcaaggagaatattgtgatttgtttcgctgcgtacttcgttgattttcgtcattcgtctcgctgcatcatcgagatgtgcgtgcgtatcattggtgtgcatgacggtcaggtcccacagtccgtctttaggaggatctggatttgaatcatcatcgaattgcagcttatacacaccatagccttcattcgcagacttgcctacataagcgacatcgtctgctttatcggcaaatggcttggccaaaagcgaggattcaaacgtcagattcgtgccggaaacaggcgcgattgaccagttgttgtctgcttttggattgactgttttttgttcaataatgtaatccatcagcacctgcctgttttcaaccgcagagccgtggacaattttattgctcgtcagatgagggaacccgccgcctccggacgcacgatagttattggtgactacgagaaattcctggcttgggctgatcggcttgccttcataggaaaggttgatgatacgggatgaatccgcattgatcacttttccgttctcattgtatttagccggttttgtcacatcgacctgatatgtgacaccgtcaatcacgtcaaaattataggaacggaaattctcgttcagcaaggcctgatcgccgcctttggctggatcaatttgattgaattggcctgccgacatctccagccagtccttcacttcgctgcctgtcagcttgacgatttgaacagtattatcgtaaaggtacaagtcaccgacatttttaatcgcaagatctccggctggaatgtttgtatagtaattggctccatttctgccgcctgctttaaacggcgctccagcggataaaatcggcaggttcttgtactcggtatccttcatttctttttcggcataccatttttgcgcgtcagtcacgatctgaatggaaggatcatctttgacctgtgcaaagaagctgttaatatctgcttcggttttgccgactggctttcggacatactccagtgtgttttggtgtgtttgctgaatggtgtttgtaacggtttcgtttcttgatgtgacgttgccagcaatagattcaatacttcctttggaatctgctaccttccatgagccgtccgccttttcaagcttgaggtcaatcacgcctaaatatttgccccagctgcttggcatgacgacaggaatgccgttaattgttcccttttccacatcaaattgagcaacacccgcatactcggaggaaggaaagagtccgtgctgatggcccgagataatcgcgtcaatgcctttcgttttagtggcaaggtcaaacacggcgttttctgcgcctgatgattgtgactgcttttcaatgccggtgtgggcgagggcaataatgacatctgcgccttccgccttcattttcgggatcgtttcattggcggattctacgatatcctgcacctgaacttgcccctcgagattctttttgtcccatgtcatgatttgcggcgggacaaagcctatgtagccgacttttactttctgctcattaccgttttcatcaatgagggttttttcattaatcatatacggcgtataacggttttcgccgctagttgttttgacgttggcatttacaatcgggaaatcggctcctttgattgtgccgtcgagaaagtcgagcccgtagttgaattcatgattgccaagcgttccggcgtcgtatttcagcgcattcatgacgctgataatcggatgggttttcgcgccggagataatatcgtctttttgatatttcaccgcgtattcacccagcggattcccttgaatcaagtcgccgttatccacaagaagggtgttagggttttgcttgcggtgcttttggatcaattgcgctgttctcgccagaccgaaatccgccgtttctttgtcgctgtagtaatcgtaatccatcatgttggcatgaatatcagtcgtagccaaaatactcagatgcacctgaggagccgcgctttcttctgcatgaatgggtggtgttgggaggattaggctaagtatcataattgggggcaaaagaatacggagaatgtttctgacgtgtgttcgtcttttctgtattctcaccagttctccacctttcaacgaaatttgtgttacagctcctattgtaagaatattttgtaactatttgtaggtgtttctttatgattattgtaaaagggagaaaaatgagtattatgtatcagtatcaagcgacaaatactgggtatttatgcttatcgtttgtcacaatcgcggaatgtttattttagtgtggctggggtagagtgttttatgtagacatataaagcgggaggttatgaatcatggggaaaaaaattgcagttgttttaacagattattttgaggacagcgagtacactgagcctgcgaaagcttttaaagaagcgggacatgaactgactgtcatcgaaaatgaaaaaggaaaaacagtaaaaggcaagcagggaaaagcggaagtgacggttgacgcgtccattgacgacgtaaatccttcagactttgatgcgcttttgattcctggaggattttcaccagaccagcttcgcgctgacgatcgtttcgtccaatttacaaaagcgtttatgactgacaaaaaaccggtattcgccatttgccacggcccgcagcttttaatcaatgcgaaagcgctcgacggccgaaaagcgacgggctatacgtccattcgtgttgacatggaaaacgccggtgccgacgttgtggacaaggaagtggttgtttgccaggatcaattggtcactagccgcacaccggacgatataccggcatttaaccgcgagtcattggcattgcttgagaaataagaaaaaacggacgcccacgggcgtccgtttttttgttgcttaggcttgagcacctgtcagtttcttgtacctgtaatacaagaaagcagctgcagccgttccgatgaccgcaatgccgaagtcgaatatgaaaatatgagcgatgccccccgcttttgcgataagccctgttgcaatcggcagcagaatcgatgcaagacttgaagcggtcgctacaattccggtaacggttccttttcgcttccagaaaagctctgtcattaacgtaatggtaatttgaaacacacccgcagttgaaaagcctaagaaaaaggcagtgatgtccagcacaactgggatatgaacggtcagcatgactgcgagcgtacataaagtaataataggatataagagcgttatgaagacaggtttgacccatctattcagcaaaacggctaataataaaacagatgccagagatcctatactataatagctcagcaattgtacagatgctgattcagctaaaccggctgctttttgcgcgtagctcgggagccagatttgagaaaccgtaaataaagccgtggatgtaaaaccgatgataatcagtgcggtgccttctttctgaaaaacgggttcagacaagaaaacgggagattcctgttggccgctattagttggtttcttatgttttttaggaaacgaaagcgttgataaataaataatattcaggagatagaccgctgccggcagataaaaagcaaatccgtaaaacatgctgtggtctgctaaaaatgtgatcaaaagcggcaaaagtgcggccccgacagacataaaggccttgaccaagacattcgccgaaccggaagcagtcggaaagagctcagttagggccggatatgttccggcatccatcgctgaatttgcgactccggctaataaggcgaacacaaacgccagctcatagctcggtgataaaggaataccgactaaaaagacggccataattcccgcagaagcgacaacaagcggctttctgccgattttatctgatagaactccggaaatgccgtatgtcagcagtttgccaaacccgatagcggcaatgacataactgatgccggtcggatcggtattccactgttttgttaatgaagacatattggatgcgagaatgatgttgaccatccccagaaagaagtagttgatatacattccggatgctgttttgatagatgtcgtttgcatgcttgtactccttcaaatcttattcgaacactttgctgttttggtttggggaaatgataaaaaagactcgccgagtttccggccagtctccattatttacgaagcgaggctaattcttgagcaatcgcctgcatttcacttgggctgaatgattcttttttcatcaccatgctgtgaaggtacgtgaggtcttcaatcttctcatcactgaaatcctccgctttgattacgccgacgttcagcatgttcagcttttgggaaatctcttcaatcatttgagttaatgtttctgtatttgggctggacaaatggttccatcctttctatgcgcaatataggtatgttttattctaacagaattccatcagaaaaaaaccctattctaaaagcaggctgttcattccaaaaaagtgaagacatcagttgaaaagaaaatgaacatcctactaagatattcatgaaggtttctttttagagaaataggggcaaagaatagggaggttggacaacatgataagcgtgttatttgtttgtttaggaaacatttgccggtctccgatggcggaagcgatttttcgggacctggcagccaaaaaaggattagaggagaaaatcaaggcggactcagcgggaatcggcggctggcacatcggcaatccgccgcatgagggaacgcaggagatattgcgcagagaaggaatcagctttgatggcatgctggcgcgtcaagtcagcgaacaggatctggccgattttgattacatcattgcgatggatgcagaaaatatcggaagtctcagaagcatggcgggatttaaaaacacttcacatatcaaaaggcttttggactatgttgaagattcagatcttgccgacgttcccgatccttactacacagggaattttgaagaagtctgccaattaatcaaatcgggctgtgagcatctgcttgcgtctattcaaaaagaaaaacaattgtgagtgaaaggagaatttgcatgaacaacgaacgtttaatgctgaaagggatatttctcggagctgcggcaggtgcggcgttatcactgctccataagccgacaagacaggcgtgcggcatgagatggctgacatgcaagcataaactttcactgtacaaaagcaatccggagctgttaaaaaacactgtcatcacaaaagtggatgaggccaaaaaactcgcccaaacgctttcaaaggaagtcgactttgtgaaccagcaggtgaaagagctgaagaaaacaacgccgcaagtgatggaactcgtgcaagaaacgaaagagcatttttcaaaaaaatgatcaaacatgcgaggtgagacgacatgagttttttgaaagagcttttcagcagatacacccttcatgaaggacaaagtaaatcagcggagctggcgtatttttttctattgtcactgtttccgtttttgatttttatgctgacgctcaccgcgtatcttccgctttctaccgatgatgttttaggagtcatagaacaatatgctcccgccagtgcgatgtcactcgttgaatccattacccatcaaaccttaaataatcgaaatggcggtttgctgtcattcgggattatcgccgcattatggtctgcgtctaatggaatgaacgcgatcgtccggtcgctgaaccacgcgtatgatgtggaagaaaaccgctcttttatcattgttcgtctaacctcgatttttttgacgattgccatggtatttacgattttagtggctttgcttctgccggtatttggccgggagattggaaggctcgcttctgactttgtcggcgcgtcggatctgtttttatccgtctgggccgccattcgctggggtgtcagcccgcttgtgcttttgattgttttttccgcgctgtatgtgattgcgccgaacaaaaagctgtctctccggtttgtcatgccgggtgcggtctttgcgactatcggctggatcattgtcagcacattgttttcattttacgtcagcacgtttgcgaactatagcgccacttacgggagcatcgggggaatcatcgttctgatgatttggttttacttgagcggcattttaattatcctaggcggagaaatcaacgctcttttacataaacgtaaaaagcttcctgatgaaaatccctaccattagcgcaccctataaacgaacttcggttcaaaaagaagtcggggggatatcgtgatgaccaagcatacgaaaaaaggcggaagccataacaaacaaaattcgaaaagcaaatcgagcaataaaacaagcggaagcgccaacggacaaaacggctaccattagcataaaagcctcctgacatgatgtcgggaggctttttgattaagaagatgaagaataggtttcagccggtgaccagcttttcggtttgcccagcacaagggccagccacacagcgctaagcgtgagagtaatgaagtagaacaagtttgcgctttcaaatgtctgcatataccagccgccggcaaccgggccgaggatgctgccgagactgaatgtaatgccgcaaagcaggttccccgccggcaggaggtgaggcggaagaaggtctgtcatatagctgatgccaagtgtaaaggttgatccgactgccattcctgcaataaaaaagcagccgccgatcacgtaaggcgaaggaaatacaccggcgatgaaaaagcaaagagccccagtcagcaaaatcaccagcagcacattccgcctgccgtatctatcgctgaggatgccgagcggaaactgaaagataatgcttccaatcgcaaatgcgggaaggatgatcgctactgcgtctactgatatccccaaacggagcgcgtacaccggaaggcttccgttcagcgccgtttccagaaagccgtagccaaatgtaggcataaaggcaacccacccaaacagcatggcctgataaaatcgcctgaaactattgtctgatttggtttcatgaggactggtttccgggtatgcattttgtagaaagaaaacaaaaagccacgcaaacagactgatgcagccggacacgataaaaggaagcgacggactcagcttgacaagcggcaccatgaatgggcctgcggcaaagccaaggccaaaggaaagcccgtaaatagacagatttctcccgcgattttgttttgatgacatggaggtcacccacgtttgcgtagaaaagtgaagcatgtggtcgccgattccaatgaacaggcgaagcaggaaccagacccaaactgactgaagccaaataaatccgaataagcttaaaatgacaatgcttccgcccatgacgatcagcggcttgaacccgagctttctgagcggcgcttccataaacggcgaagccaaaagcacaccgatatacagcccggtcgcgtgcaggccgttgatagcagcggattctccatttgtttcaaaaatgattgaaatgacaggcagcagcatgccttgtgaaaacccggaaatggatacgagcaagacaaggataaagaaatgaaatcgtgacatcgtgtcagttctccttatatggaatctatgttgatcgtacaatgttttccaaaagcaggcaacctgaaaaaagcctatatcacgctatacatttgccctcgtgtaatcatgaaggtttttgtgaagaataaaaataaaacaagtcataaaaaaggagctatttcaccatgaatcgtatcttttttattttagtggcggccggtgttccgctttctgtgattggcagtttgatgcattggccttccgcggttctatttgcagtttattgcgtgacgattatcgcgcttgcaagctatatggggagggcgacagaatcactgtccatcattgcaggaccgcgtatcggcggtttgttgaatgccaccttcgggaatgcggtggagctgattatttccctttttgcattaaaggaaggcctgacaggaatcgtgcttgcctctttaaccggttcagtgctggggaacctgttgctggtagcgggcctatcgttttttgtcggcggtttaaaatataagcggcaggaatttaatatccatgatgcccgccataactccgggcttctgatttttgccatcattgtcgcctttgtgattccggaggtattctctgttggtatgggaaacgccagcaagctcaatttaagcatcggcatcagcatcattatgattctgttgtatgtggcggcgctgtactttaaacttgtcacgcatcggggcgtttatcagccgaataatgccgctcagactgaagaagaggaagagccggaatggtcagggaaggttgcgacgattgtcttgtttgcggcaacgattgtggttgcatacatatccgaaaacctggtccatacctttcactcggttgctgaacagttcgggtggagcgagctgtttatcggggtcatcatcgtggcgattgtaggaaatgcggcggagcacgcgtcagcgattattatggccttcaaaaataaaatggacattgcggttgaaattgcagtcggctctacgctgcagatcgctatgtttgtcgcaccggttctcgtcatctgttctatcttttttccgacaagcatgccgcttgtatttacattgcctgagctcgtcgcgatggtatcagcggttctcttgatgatcgcgatttcgaatgacggggattccaactggtttgaaggggcgacactgcttgctgcatatgtcattatggcgatcggctttttccttctttaacctgaaaaaatgatggataacaacaaagcgggatgaaaagactaagggaaaatgccatagaaagagtgatatgatgaaaaagctatttcattccacacttatcgtgttgttattctttagttttttcggcgttcagcccatccacgcgaaaaagcagtttaaggttcctaattctgtcgcaagcatttcaaaggaaaacacgtatccgaatgcttcacaggatcagccaatgcttcagccgagcaagctggcaaaggaattgctcgatcattctgaggtgaagattgaaaatccgcatctcatcaaaatgctgaatgaatccaacatatccggcacaccgcttgcagtagggtatcgggcgacaatatttctcgggaaatgggcgctcggctatgaatcaaatgaaacagtcgcaaactgggaatataaaaaaatcaatacaaaccgtgcggataaccgcggcgggaaagaaacggctgaaatgcattatgcccaggaacagcagtacagagtgaagggcggcctgacagctaaagttccaaatgctgaagatgtcaaaagcatgatgatgcaaaaagcaatgaagaaaacgaaccttccgcttgcatttgagacggtcattggggctggcacaaaacgggatcagatttataaagtcgctcctaaaaaaatcggttatttacatgcatatgcaccggctgtgaatgaaaaaggaaaagtgacttacggagaagtgtacttagtgctgaaaggaaataaacgaaaactcgtcgtgaaaaatgtcacgtcacagggcatcggtgcgtggattccggttcaagatcatgtcacatttggctttcagctttcctcactgccaagataaataaaaaactgattccaactcggaatcagtttttttgtttattgggttctctcgattcggaccgcttcctcaagcatttgcacattgttttggtagagctggcgaacgagaacccgtctgactgcaaggctggcactgaaataatcatcatctttcaccatgcctttaaccgtaaattcgacgccgcgattgattttattcaatgcggtgatgccgtggatttgaaacggttctgtcggattgccgaattcatcccgcttcaatgaatcacgaagctcttcattcagcatgtcacatgcctcttccaacacgctgtacacgcggtccggatcttctttaaagctgataagaaaggattcggtaatccgcataaaatcaatattatagttctctatttgtctgacctcgccgttgctgatggtgagcagcttcccgctccattcccggatttgcagcgagcggaggccgatttcctccactgtcccgttgaacaagttgttgacggtgacataatcgcctttgtgcagctggcgttcatatattaagaatacaccagccagcacatctttgatcagcgattgggcgccaaaaccgatcacgatacctgctacgcccgccccggccaatatcttgccgaaatcatgcacaaataaagaaataacgtaaaagataaaaccaattgttgccgtatactgggtgacagaacggacaaggctttcaatcgttttttcctttttttcttcaataaaatccgtccgtttaaaaaatagctgtaccagccggttgatgataaagacaccgatccaaaggataacggcaacgaggagaatatcgacgattttattttgaaaaatctccgtaagtgtttctttcatccgcatctaactcctggcttgacgttttgtgaagtctgtatcctgataataactgtttttgacaagaacattcggtccgaggcaccggacattcgggcagtggcaacttagttccttcgcaagcttggtctctctccacttttcataggcggaagggaggctgtccgtctgaatgttgccaagcggcggggtatcaccgaaatcggtcacgataatgtttccgtcgaaaatgttcacattcaggcgggatcggccgtcagggtcatttcgcactgtgacgtttttcgccgcgcgaagccggcgaagcagcttttggtcgtcttcgtccggactgcaggcataaaacggcagcgttccgaacagcatccacgtattttcatcacgaatatccagcaagcggtgaatggcctgtctcatctctttcaggctgagggattcaagagcgcttgcgaaatcgcttggatacattgggtggacctcgtgacgctgacatttcatatcttctgtgatttggcggtgaatatgctcaatatgcggaagagttcgtttgttcagcatcgtttccgcagataccattactccggcatccacgagcgtgcggctgttttcgatcattttttcaaaatagcgcgcgcgctgttcgaaggtcggttttctgtccatcatggcaaagccgatttcagcaaaatcttcaactgtaccccagttatgagaaatatgtagcacatcgagatacggaatgatccattcgtaccgctcgatgtcgagggtcagatttgaattaatttgtgtccgcacaccccgttcatgggcatatttcaataaaggaacaacatattcttttactgatttcagcgaaagcatcggctctccgcctgtgatgctgatggatctgaggcgcgggatttcctccagccgttttaacagaagatctattggcagagcattcgggtctttaggctgcaatgtatagcctacagcacaatgctcgcatctcatattgcacagtgtcgtcgttgtgaattcaacgtttgtcagctgcatgtctccgtattggtcaacatccatataggcttcccaagggtcaaactcgggcgtaatcggacgcagcttcgtgttttgtgtcatgactatctaactcctttataaatgggcatactaacgctgccaacagttaattttagacctgatttgccaagatcgcaagtagcgcggcgattgaaaaacggcaaaaaatgagctaccataataaaaaatgaatggaggaacagaatggggaacgccgtaaacaataaagatcagcagattgattatttaaagaacagacttgacatgtttatgaacgtcatcgattcattagaccctgaagcaaccgacgttgaagatatagacaggcttatcagcatgcttgatgacctggaagccaaatacgaacgttttaaaaaagattgggaataaaaccgcgtgcccgccgcggtttttttattggcataaagcaacagtataaaacaaagcccctatctgtaaaataagaaaaaatgcagaaggagcgctggccatgaagtggatgtgttcaatatgctgcgccgccgtattgcttgccggaggtgcagcacaggcggaagcggtgccgaatgagccgattaattggggctttaaacgaagtgtcaatcatcagccgccagatgccgggaagcagctgaacagtttgattgaaaaatatgacgcgttttatttagggaatacaaaggaaaaaacgatttacttaacgtttgataacggatatgaaaatggctatacgccaaaagtgcttgatgtcttaaaaaaacatcgcgtaacaggaacgttttttgtcaccgggcatttcgtaaaggaccagcctcagctgatcaaacgaatgtcagatgagggccatattatcggcaaccattcctttcaccatccggatttaacgacaaaaacagctgatcagattcaggatgaacttgattcagtcaacgaagaggtttataaaattacgggaaagcaggacaacctgtatttgcgtccgccgcgcggcgtgttcagtgagtacgtactgaaagaaacgaaacgcctcggctatcaaaccgttttctggtcggtcgcttttgttgattggaaaatcaacaaccaaaagggaaagaaatatgcctacgatcatatgatcaagcaggcgcacccgggagccatttacctgcttcacaccgtatcgagggacaatgcagaagcgctggatgacgcgattacagatctgaaaaaacagggctacacatttaaaagcattgatgatctgatgtttgagaaagaaatgaggctgccgtctttgtaaaagagaaagacctctccttaaacggagaggcttttctttattttatacatttaatcagtgcggcccagtccagatccccgaagcctttctcaatcccgttttcaaaatggcttttggccagctcggcaagaggaagatttgcagaaacccgttttgcggcggcgagtgccaggttggtatccttcagccctaaagacattttgaagccggccggctcaaatttctgctcggccataatggttccgtaattttgatagactggagaaccaaagagcgcgctggcgatttctaaaaattgtttttgttctaagccgtatttctccatcattaagaaggattcagataacgcctccagcatagacacgagtaagaaattgatgctgattttcgctgcatttgctatcttgctttcttcgccgacgtcaaatacctgctggctgaggctgtcgagcagaggcttggcggtttgcttcgcttccgccggtcctgctgttatgatgcgaagcgcggctttggctgcggcatccggtctgccaaggacgggagcggcgagaaaggattgtcctttctctgcatgagccgctgcgagcttttctgagaactcaacactgattgtgctcatcgagatgtgaatgccgttctctgctaatccttcaagcagcccgtcttctccgaatgtcacggtgctgacagaatcatcatctgcaagcattgtgatgacaatatcagcggactttgccgccagccgcggcgtatcagctgcctgtgcgccttctgtgacaaggtcttctgtcttttgtttcgtccggttatagacagtcaattcgtagcctgcttgaagaacatttcgggcaatgggctgtcccatattgccgagtccgatgacagcaattttcaatctgatcactccctgaatattttttccattataaacaatatgaacagaatatgcatagcgatcggcttataacaaaaaagaacagcttcccgctgccctcatttaaaaatattgaaccatcctttatgtacaaaccaaatcagcatcccgattacaagcgcagccatcaggccaagtacagcaaaatatccgtatttccaatgcagctccggcatgaagtcgaaattcataccgtatacaccggcaataaaggtgagcgggatgaaaatggttgatacgatcgtcagtgtcatcataatcgcattcatccggtttgagtttagcgtcacgtagctgtcacgcaagtcagacgtcatgtcacggttggattccacaatttcagataactttaacaaatgatcatatatgtcgctgaaataggctttcgtttcccgctgttctttcacatggtcaaggcttaaaatccggtagagcaaatcacgcatcggaataatcgtccgtctcaaatgcaataggtctgttctgagatcaaacacctcgttcatcagcgttccatacgttttgtggggacggctttcttcaatttcattcagccggtcttcaattttatacacgagaggaaaatattcatcaacaagctgatccatgatcatataagaaatatgcccgggcccttttttcaatatatccggtgaagcatacaaacgctcccggactttagcgataccgggcgtttcgtgtaaatgaaaggtgacgacaaatttttcgccttgaaagatatcgacttcctccgtctcaagtgtttccttattcagcgcatgaatcacgtaaaaacgatagccgtcataatggtcaagcttcggccgctgcatatgctggaagcaatcctcaatggcaagcgggtgaaaatgaaaaaaatctctcaataacgccgtttccgtatcctccgggccgtaaaaatcaacccagtaccatgcaatatcaggctgttccactcgttcgatcggtatatttttcagcagctgatgctctgttgtgattgcggtaatgttgatcataaacaaccctccacctgccattatatcatgcggtctttatgagaaaagtatacggtactctctgcctaattcaagcggcatgttatactgaacaaaaacggaaaaaagggtggatctcatgtggaaggaaaaagtatctgtcacgcctccgtatcattttgaccgcgtgctggacaggctgtctttagaccccctcaatgctgttgatcgagaggcgagggaagtccgtgtgccaatcagaaatcaagcgggggacgtatgtattgtaaaggtacaggcgttaggccatgcgggcgagcctgagttcctcgtcagcggggaaacggatcagggagaaatgatgaaggaaatcaagcggatttttcaatgggaaaatcatttgcagcacgttctggatcatttttcaaaaacgagcctgtccgccatttttgaagagcatgccgggacgccgcttgttctggactacagcgtgtacaactgcatgatgaaatgcattatccaccagcagctcaatctttccttcgcttacacgctaacagaacggtttgttcatgcgtttggcgagcagaaggatggcgtgtggtgctatccaaagccggaaacgattgcaaaactcgattatcaggatctgcgtgatctgcaattcagcatgagaaaagcggaatacaccattgatacatcaaggatgatcgcagaaggcacactcagcttgtcagagctgccgcatatggcggatgaagacattatgaagaaactgatcaaaattaggggtatcggcccgtggaccgtgcaaaacgtcctcatgttcggacttggccgtcccaatttattcccgcttgccgatatcggcctccagaatgccatcaaacgccactttcagctggacgataagccggcaaaggatgtcatgctggcgatgagcaaggagtgggagccttatttaagctatgcgtctttgtatttgtggaggagtatagaataattcgtctgacaatgaaggaaatcctgcaaacgtgttatactagaaagatgtgaaaaaaccatttcactttctgccatccgcagaaagcttcatatagaaacggagagaacaacgtgaaccaacaaaagaaacaggcgcccgtcgaactgaaggtcggacaaacctttccgctgacgattaagcgtctcggcattaacggagaaggtgtcggctattttaagaaaaaagtcgtcttcgtgcccggcgcgcttcctggcgaagaagttgttgtgcaggccacaaaggtccagccgaagttttcggagggccgcattaagaaaatccgcaaggcatctgagcaccgggtggcaccgccttgccctgtttatgaacaatgcggcggatgtcagcttcagcaccttgcatacagccagcagcttcgggaaaaacgcgatatcgtcattcagtctcttgaacgccatacgaagtttaaagttgaaaacatggaaatcaaagaaacgattggcatggacaacccgtggaattaccgcaataaaagccaattccagatcgggcgctcgcaaagcggcagcatcatcgccggcttatacggccttgattctcatgacatcgtgccgattaaagactgtatcgttcagcatccggcaacgaacaaaacaacaggcatcgtccgccgcattttagaggacttcaatgtgtctgtttataatgaaagaaaacgaaaaggtgacgttcgcacgatcgtgacgagagtcggctttgaaacaggcgaagtgcaggtcgtgcttgtaaccgcaaaagaaacgcttccgcacaaggaagaaatcgtcaaagcgattcaaaagcgattgccagaggtcaaatccattattcagaatgtaaacggggcgaaaacttcagtgattttcggtgagaaaacaaaaccgctcgccggaaaaacagtgattcaagaagtgctcggcgacgtatcttttgaattgagcgcccgcgctttcttccagctcaatccggaacagaccgtcaagctgtatgatgaagtgaaaaaagcggcgcagctgaccggaaaagaaaaagtcgttgatgcgtattgcggcgtcggcactatcggcatgtgggtggcggacggagcgaaggaagtccgcggcatggacgtcatcaaggaatcaattgacgatgctaagaaaaacgccaaaaaacacggcatggcaaatgccacatacgtaacaggaacagccgagcactggctcccgaaatggacgaaagaaggcttccgcccggacgtcgtcattgtagacccgccaagaacgggctgtgacagcacgttcctggacacgatcaaaaaagtcaaaccgaaacgctttgtctacgtttcctgcaatccatccacgcttgcgaaggatttgcagacgctgtcgaaggactatcgcgtggactatatccagcctgtcgatatgtttccgcagacggcgcatgtggaagctgtggcgagacttgtattgaaatcgtctcattaattcctaatcagatctggatttcggcagaatgaacattgccgatttccgggtctttttcgtgcatagcccttgtcctaactgtctgttctcaattttatcttccttctcattctcggagatctttattttaactggcgaaaagagttgaaaaaacgtgttgaaaagcgggtgaaaataagcgttatttaaccgggaaaatatcctcccagtatgattaaaatacatgagtaaaataatgtaaaatcatagatatattttcataatttgtaaaattatatattgacttgcagttattatgtgtgaaatattgattataggaatataaggaaaggtatggcgtatatcatttcaagagtcattcgatgtaaaaagttgaaacattgtaattaaatgaaagaggtgaaaatgatggccaaccccattttaaaatgaataatgtatgagcactacaacaattaaataatagtgccgacgataacaactattacagtaatacctacaatggttatatccttgcgacaatcatgcttcataataatttagattgacacttggctaaaaagtattgcagagaaggaaatggataactaaatggataaagtatataaaaaacgaccgttatataaaagaagttggtttcaaacatttttggcatttttagtatctcagctttattttaattttgtagaattaacgggagggggtcctaagtatagagaaatgaatggattcccagcaaacatagttgaactagatttctttcaaacatatctttcattctatgataatccatggtttaatattattactgttttcttgggagttttcactattatacaaataattacaggggtaacaaaggatattcgaaattaaagcaataacttctgatgccttatttaataatgaaagaaaatgtacactttcttaattatcttatgagtgaagactgcgacacttagtcagcagtctattttattggttctggatcaggcttaccgaattataaccctatacaaatatatagtaggttgccacttgctgcgttggttattttctaaatcatgagcaaatgccaaatgattcagattgaagttcttgaattcttttaaataaggatttattttctcttctcatcctctttactccatgtgattcataagtggtagcagcttaagtagagttttttttattctcttgagtactcagttataccacccccaactcaatttgcttaatcaaagtttatctcttgaaattagtttttccgcaaatatgatattgagatacggatatggtgtagcgttaaatatcttatcctcaataacaggacaattagtttgcgttggtaatatggagaactcatatgatattctatttaggttggaatcctttttatccaaaaagttcaaaagcaaggccactaagaaagacgaaggtcagcgccagtgttaaccacaatataaaaaatagggtagctaatcatcccacgtgaaatgttcaaaatttactatagattgataagaaatgctttcgcatgcgataagtgtaaaagaagcatggtcagttttttaatattgagatacaggtatagccgtatcccctaatgaaaggatttgatttttgttatgacagaaaatttctggcgtgaattaccacggccgttttttgtactggcaccaatggaagatgtgacagatgttgttttccggcatgtagtaagtgaagcaggcagaccggatgtgttttttacagagttcacaaactcagagagctattgccacccggatgggaaggatagcgtgcgcggccgtttgacttttacagaggatgaacagccaattgtggcccatatatggggagataagcctgaaaacttccgtaaaatgagtattggcatggcagagttaggatttaaaggactagatatcaatatgggctgccctgtgcctaatgtggcacagaacggtaagggaagcggtcttatccgccggccggaagttgcagcagagttaatacaagcagcaaaagcagggggattgcccgtaagcgtaaaaacaagacttggtttcacggatgtagacgaatggcgcgagtggctgacacacatactgaaacaggatattgccaatctttctattcatctgcgcacaagagcagaaatgagcaaagtagatgcgcattgggaactcatcccggagattaagaaacttcgtgacgaggtggcaccagatacattgttaacaataaacggggatatccctgaccgccaaactggcttaaaacttgctgaacaatacggtgttgatggaattatgattgggcgcggtatttttacaaatccatttgcctttgaaaaggagccgaaagagcatagcagcaaggaattgcttgatctcttaaggctgcatctggatcttcatgataagtattcagcattagaagcgcgtccgtacaagcctcttcctcgctttttcaaaatttaccttcgcgggttccgaggggcaagtgaattaagaaatcaatgcatgaacacaaagtcaacagatgaagtgcgtgcattgctcgatgactttgagagaaagtatcttgatggtttagagtaacagcagtgcttgattcaaaaaaggctaacaccattcttgactaaaataaacctggatgttcggtaaaataaacaattccgatttccgggtcttttttgtacgcagcttttactcagcctgtcttttctctaatttattgtaagaaaataatggtatatttagtggagataacttataaagggggagaggaaaatgaaacgactatgcatcatcccctgcggcaagaaaaaaatctgggacgtccagcctgatgccgggccggtaagagcagaggacgcttatctcagcccgtttcatcaggtgtgcgagcggtatgcgaaagcatttttcgatgagtgggtgattttgtctgcgaagcacgggttcctccgccctaatgatctcgtttcgggaaattacgatgtcacttttggcaccggtcatccggaaatcatgacagcggacgagctgagccgccaatttcacgaaaaaggcttttctgatatcgaagagctagtcatgcttggcggaaaaaaatatcgaagcgttctaaacgccgtcatcggagagcaccagcatatcagctggccgctatcatcatacaaaggcataggctacatgctccaagcgctgaaccgagctgttgaagaaaagcatgaactgtagcacgtatataagaagaaaagagtgtgaacatgaaaaaacttgtgtttggcttgcttgccattgcgttattcggatgcggactatatatctatcatgtatggttcggtgatccattttcgaaaaatgctgcagaacagaagctagtctcttatgtgaaacaaacctatcctaagaaagaaatcaagatcacgaatggggtatataacgctaaaacctctgaatatgtattcgaagcaacctcccaatctcatcgctacccaatgtgtacgaagggatttctgcatcctaaagtaacgtgcgatggaattgaagaagcgtataccgaatcagtatcaaaacatgtaaatgaagaagcaacgaaggcaatcgaagcagatctgaaaaaagcggttcctcgacttataaaagctgatgctgctttgagtatcgaaaacggacagttcacgttagatacaaaatggaacaaacagctggctgaaaaagcgcctatgagcatgacgattcagttagacgccagcgggttatcaaaaacagatgccgcaaagatggcggaaattgtcagaaaaacgcttaatgaaaagggatatacatactcaaacggcacgatagactgtatgcagaaggacggggacggcggtatcggatatgtcaaatattcaattgattttctttcaaaagcagctattcagtcaaacgatgcagaggaactaggaagttaaaaagatttccaaggaaataaatacgtcgatcattgtcaaaggccgggtgatatccggtctttttttttgcatgctgtaaaacgagacaaatgaatcagtttgagacaaaacgagacacacgtctcaaactgtctccaaagtgaagacgagaagactgattttacgggctcaaaagactggcacacttcttgcatttataatggtgaaccctaaatagaaggaggcgcacaaaatgaaattgttaaaacgagaaggcttgtcattaactgaggaaaaagcgctgtggatgtaccaaaagatgctggagatcaggggctttgaagacaaagtgcatgaactgttcgcccagggagtgcttcccggattcgttcatttatatgccggtgaggaagccgtggctgtaggggtgtgcgctcatttacatgatggcgacagcattacaagcacccacaggggacatggacattgtatcgccaaaggctgtgacctggacggcatgatggcggaaattttcggaaaagcgaccggattgtgcaaaggcaagggcggttctatgcacattgcggatcttgataaaggcatgttaggcgcaaatggaatcgtcgggggcggctttacgctcgcatgcggatcagcgctcacggctaaatataaacagactaaaaatgtaagcgtttgctttttcggggacggggcaaataaccaaggcaccttccacgaagggctgaatttagcggctgtatggaaccttcctgtcgtgtttgttgctgaaaacaacggctatggcgaagccaccccatttgagtacgcatcagcctgtgattcaatcgccgatcgggcggctgcttataacatgccgggggttacagttgacggcaaagatattttagcagtttaccaggcagccgaggaagcgatagaaagagcaagaaacggcggcggcccgtctttgattgaatgtatgacctacagaaactacggccatttcgaaggagatgcccaaacctataaaacgaaggatgaaagagttgagcaccttgaagaaaaagatgccattcaaggttttaaaaactaccttttaaaagaaacagatgctaataagctgtcagacattgaacagcgtgtcagcgaatcgattgaaaaagccgtctcgttcagcgaagacagcccatatccaaaagattcggagctgctgacagatgtgtacgtgtcatatgaaaaaggaggaatgtaagagatggcgagagtcataagcatgtcagacgcgatcaatgaagcaatgaagcttgcgatgagaagagatgaaaatgtgcttttgatcggtgaggatgttgccggcggagcggctgttgatcatttgcaggatgatgaagcatggggcggtgtattaggagtcacaaaggggctcgtacaggaattcgggcgcacaagagtgctggacacaccgatttctgaagcgggctacatgggtgcggctatggctgcggcatcaaccgggctgagaccgattgcagaattaatgtttaatgactttatcggcacatgctttgaccaggtgatcaaccaaggggcgaaattccgctatatgttcggcggtaaagcgcaagtgccgattaccgtccgcaccacatacggagcgggatttcgggccgctgcccagcattcacaagcgctgtatggccttttcacgagcatcccgggactgaagacggttgttccatccagcccgtatgatgccaaaggtctgctgcttgcagcaatagaagacgatgatccggtgttcttctttgaagacaagacgtcctacaacatgaagggcgaggtgccggaagattattatacaattcccctcggaaaagcggatatcaaacgcgaaggcaatgatgttacgctctttgcagtcggcaagcaggtcaatactgcgcttgaagcggctgcacagctttcagagaggggcatcgaagctgaggtgcttgatccccgcagtctgtctcctctggatgaggatgcgattttcacatcgttagaaaaaacaaaccggctgatcatcattgatgaagccaatccgcgatgcagcattgccacggatattgctgcgattgtcgctgacaagggctttgatttgcttgatgcgccgattaaacggattacagcgccgcatacaccggttccgttttcaccagtgcttgaagatcaatatttgccgacaccagataaaattgtcagcgtcacgcttgaattgcttggcgagccggcaatgaattaaaggggggacacaaatggcggtaaaagtagtgatgccaaaattgggaatggccatgaaacaaggggaagtatcgatatggaataaaaaagtaggcgacccggttgaaaagggagaaagcattgccagcattcaatcggagaaaattgaaatggagatcgaagcgcctgaaaaaggaacgctgatcgatatcaaagtgaaagagggagaagaggttccgcccggcacagctatctgctatatcggggacgccaatgagtcggtgcaggaagaggcgagtgcgcctgttgctgaagacaatatgccgcaagccgttcagcccgtcaaacaagaaaacaaacccgcagcctccaaaaaagatcgaatgaaaatatctccagtcgccagaaaaatagcagaaaaagcaggattagacctaaaacaactgaaaggaactggaccaggcggacgaatcgtgaaggatgacgtaacaaaggctcttgctgaacagaaaaaagatcaggcaaagcctggttcggaacagaaagcgcaggaaatcccggtgacaggcatgagaaaggtcatcgctgcccgaatgcaggaaagcctggcaaacagcgcgcagctgacgatcacgatgaaggctgatatcactaagcttgccactcttcaaaaacagctttcatcaactgcggaagagagatacggcacaaaactgacgatcactcattttgtctcaagagccgccgttctcgctctgcaagctcaccctgtgctgaacagcttttatcaaaatgagcgcatcatcacacatccccatgtacaccttggtatggctgtagccttggaaaacggcttagtggtgcctgtcatccgccatgctgaaaagctatcgctgattgaactggctcaatcaatctcagaaaatgccaaaaaagcacgcgagggacgtgcgggaagcgaagaactgcaaggctctaccttctccattacaaaccttggcgcgtttggagttgagcatttcacaccgatactaaatccgccggaaacaggcattctcggcatcggagcaagctatgacacgccggtgtatcaaggggaggagatcgtcagaagcacgatcctgccgctcagcctgacatttgatcacagagcgtgtgacggcgccccagccgctgcattcctgaaggcgattaaaacatatttggaagaacccgcagcattaattttataggaaaagcaggtgaaaacgacatgacattagccattatcggcggcggacctgcaggctatgcggctgcggtctccgcggcacagcagggcagaaacgtgctgctcattgacaaaggcaagcttggggggacctgcctgaatgaaggctgcatcccgacaaagtctttgttagaaagcgcaaacgttcttgataaaatcaagcatgccgacagctttgggatcgaacttccggcaggtgcgatatcagtcgattggagtaaaatgcaaagccgaaaacaacaggttgtcagtcagcttgtccaaggcgtacagtacctaatgaagaaaaatcaaatacaggttgtaaagggaacagcctcctttctttctgaaagaaagctcttaatcgaaggagaaaacggaaaagaaatcagagaggcggaccaagtattgattgcctccggatcagagccaatcgagctgcctttcgctccgtttgacggcgaatggatcatcgacagcaaagacgcgctttctctttccgagattccgtcttcactagtcattgtcggcggcggtgtcatcgggtgtgagtatgcagggctgttcgccagattgggatcgaaggtgaccatcattgaaacagcggaccagctgattccggctgaagatgaagatattgcccgtctctttcaggagaaacttgaggaagacggtgtcgaagtgcatacttcatccagattagagcgggtggatcaaacggccaaaacggcaatatggaaaagcggtcagcgagagtttaaaacgaaggccgattatgtgctggtggcgatcggcagaaaaccccgtcttgacggattacagctggaacaggccggagttgatttttctccaaagggcattccggtgaatgggcacatgcagacgaacgtgcctcatatttacgcgtgcggagatgctatagggggcattcagctggcgcatgccgctttccatgagggcatcatcgctgcttctcatgcttccggaagggatgtcaaaatcaatgagaaacatgtgccgcgctgcatctatacgtccccagaaatcgcgtgtatcggaatgacagaacgacaggcaagaagcatatacggggatgtgaagatcggcgaattttcattttccgcaaacggcaaggcgctcattaaacagcaagcggaaggaaaggtcaaaatcatggctgaaccggaattcggcgaaatcgtgggtgtctcgatgattggcccggatgtaaccgagctcatcggccaagcggcagcgatcatgaatggtgagatgacggcagatatggcggagcattttatcgccgcccatccgactttatcggaaacattgcatgaggcgctgttaagcacgatcggccttgcggtacatgcataataaaggaaaaagcaggcgcatggatataaggcgccggcttttttattgttgaaagcgctttatttttcccctacaatagatgaaaacggcgtgtaagggaggagcgatcaaggaaatgaattcggtcccaaacgatttgcaaacctggaaacgttttgtgaaagacggtgtgcttgacgaagcccgattaagaaaacggattgcagagtcatggcatcgctgcaaaaaagctgaggtcaatccttatttagaaaaaggcccgaaggttttacagcaaacggagctggatcagcagtcaaaaaaacattcattcttcttgacgaccgcaaagccttacctcgaaaaactgctgcctgccataaaagaaatggaaatgatggcgctgctaattgatgcagacggtgttgttctggcattggacggccatcccctcgcgctctatgaagccaaacgcatcaactttgttgaaggggcatgctggacggaaacggctgtcggaacaaatgcgattggcacggcgctccacatcagcgagccggttgcgatacaaggatcagagcattactccattgcttcccatctttggaactgttcagccgctccgattcaccatgaggatggcagccttgcgggtgtgattgacatatcgtgtccggcggcaggcgctcatcctcatatgctcggtattgccactgcgatcgcctatgcagctgaacgggaacttgcagctaaaagccgtgagaaagagctcgagctgatcagccgttttggagagagggctgcatccagtgtgccgatggtgctatgcaataacaagcagcacatcatcagtgcgagcataccgattcgaacctcaatgcctgattggcagggccggcacctgtatgagttgaaggaacggggctactcaatcgaaaaagctgtcaccataggagatggcggcacttgtttttatctttcggaacaaaagaaaaagaaggtgttccgattcaatggagtgatcgggaaaagcggccgatcgcaagcgatgctgatgaaccttgaacgtgcagctgcggcagatgcaacggtctgtttgtcgggcgaaactggtacgggaaaggaagtcgcggctcgcgctcttcatgagaacagtgagagacgtcacggtccgtttgttgctgtcaattgcggagcgattccgtctgatttgattgagagcgaactgttcggctatgcagagggcgcttttacgggagcgaaacgaaatggctataaaggcgcctttcaaaaagcaaatcaaggcacattatttttagatgaaatcggagaaatttcccactcgatgcaggttgcacttttacgggtgcttcaggaacgcaagataacgccaatcggcgggacgaaagaaattccggttgatatcagagttattgccgccacacattgtgatttacgcgagcttgccgaaaacggaaaaatcagagaggacttgttttaccgtcttcatgtctatccaattgaactgcctccattacgcgatcgcaccgaggatatcccggacctctttgagtactacaaacagaagaatcattggccaggcgaacttccttctgatttttgtcatgtgctgaagcaatggaagtggccggggaatatccgtgagctgtttaatgtgtttgaacgtctttctatcagatttccggacggccggctgagggatgaaccgcttcccgctttactggaagccgctggattgccggccagctctgcagaaaaaaagccggctgctgccggcgtgcttacctttcgtgagcaaatccaaaaggatatgatgatcaaagcgcttgaatctgcaaaaggaaacgtctctcaagctgccaaaatcagcgggattccccgaagcactttctacaaacgcctgaaaaaattcaacttgtccgctgaatcgtaaagcatacttccttcaggaaatggaaacgttatgtattgaaggagggtgttacgatgaatattcaaagggcgaaagaaatagtagaatctcccgatatgaaaaaagtaacatataacggcgttcctatatacattcagcacgtgaatgaagaaaacggaacagcaagaatttatccgcttgacgaaccgcagcaggagcatgaagtgcagctgaacagcttaaaagaggattaaacaaaaatggcccgcttcataagcaggccattttgttatccgcgcggcgcaaataaaataacacagacaccgatgagacaaatgaatgcgccgatccagtcatacagatcaggtgttttccggtcaacaagccatccccacaggaccgcaagcacgataaatactccgccataagcggcgtatacacggccgaaagatgggaaggactgaaacgtcggaagaatgccgtatacaatgaggatcagcgccccggcgattccatagccggctggctttgcctctctcagccatagccaaaccagatatccgccgccaatttcggcaagccctgccgcgagaaataaaagaatggtaatcagcatcatgagcactcctcaatttgcatttatctttcattatagaggaggagagcttttaaagcttcggatgattctcaaattccttcaaatacgcttttcgctgaacctctgtaaattggctgatccaattgttttgagcctcttcattcaaatggggaaggacatagcgttcaaccgcttcgaaaaacagcggattcgcgatgatgttccaggtcgggatgcgaacgattttcccgtctgttttctcgatgataatatcctcaaaaaagatccctttcagactgtattggtgacgtcccatataaagccgcttcacctcggaaaacagcacgctgcgctttctcgagaagatctcgccactaggtccggtctttatgctgaaaatgacatttccacggcttgtgaacgcaggaaaagccataaagaatgtgatcaatccataaattatcgccagtaatccgccgcccaaataaagcagggcatatttagattcaaacgtgagagcttcagccaccagccagactcccacaataaaggcgccccctgtagcgaggaacagccatattctaaaaaacagtctgcttttgaccttaatgacttcattgtttttcaattgctattctcctttatcgctctttagcaaaaagtattccttttatcacatctttatttgctgttacgatagaaaattcattttgggtaatacctgttaccagccaagtatgacggctgccaggcaggacgaaagccatgtcagctacttctggggagttgtctttgtcataaaccagccgcatcagcgtatccatttttccttttcgcaaagccagatcatttacaaaacgggtaacgtcctcttggtgatcatgcttatctagaaactccttgagatgtgtgggagtgtctgaagcgccctccaaaagcaattcaaattcagttgatgtcagagagagcattgattctttgtgatcttctgcatctattatatttaaaaactcggatgttttagagagtaatccattagttgaatccatttttttgattctatgcacctgttcatcaaacagcaattcatgagagtaagtgccaaactttgaaacatggcaggatatattctgttctttgccttgttcatcaaatttggacagcttcactgtatagtccgcgtcgtttaacacatggataaacggacagtattcgtcctttagccgatattgatgattccgatattccgcagcgtccttggctaagagtgagcggcacgcggcttcaaataaggcgccgagctgttcatcttctatttcgggaaaataggcttgttttaaggccattccctgttcgaaaaacccttcgctgtaaaaacaaaacaagagttcttctatgctgattgtaaactgcttcattgtttattctcctatccaaatgaaaatttccctttaaggaaatgggttgcgccgtgtatgagcgaatccgctgttttctttgctttttctattccttttttcgcactgtctatccctttatgtatcgttttattcgccgcatctatgccgtcattcactgatttgacgactttgccggctgattccagtccttttttggctgtatcaacgacagcatggatcggttctttaagttttatcgctgctttttcagcatagactgatgtgaattttgcgattttttccccaacaaaccctcctactgccgaaccaattgtgcctccgattactgtgcctacaggacctaacacacttcctacggcaccgcccacaacagcaccagctgtcgcaccgcccgcaataaaaatggtgttattcacagcatttccgacagccttggcgttttcacgcttgagaacttcgggtttattctggtattttgcataattttcagcaattttcacgcctgctccgaatgtttcggtcgcaccggtaatcagtgtggcggtaatggcatttcctttcgcgaatctcaagcccgtttttcccacatccttcaaagtggagcgtacgccggcttcattaagaaatccttttgtgtagcttctgacgctgtttgaaaaatccaccgtgtcctgagggaagtattttgtaaactttttatgtaccaaatctgaaaatggacggttggtcttttttaacaaatatttaggattcaaaagcactcttgccgctttttgataacgtgagctgtcaacggccctggaaatatccaagagcagttttgagtgctgggctgtatgcaagccgcttggctgtttcacaaatttcgtaagccctaatccgtaatattttccctgcgtcagcataagagcggttaagcttgtcatcgtaccgtatttgtcgtaggcattgtagagctttcgcaaaatatcatcttgttccacaaatttatcgcctgtttttctgatgaaaatctcattgtcactcagcttagtgacgagcgcctttcctgagctccacgcatcgcccactccagaaaaacagctgctgtagcggggatcgcattgcaaaatcatctgccccagctccacatgcaggtccttatatttgttttccatatcagttaattcagtgactacatcatttgcaagctgttcgagcttatccggatcaactgcaatgtttcctgacacaccgttcacctcccgagtttatgtctttcctctcttgctttacgctccagttcttccattctggcaatttcagcttttcgttcttctattttgacagcggcagccttcagctcttggcttgtttcaagcagctcctgttcgaattgatcgtaggcggctttcgtttcctcgaaatcctggtcaaacgaatctcttgatttgccctgccaagcatctcccaatgcagataaccgggattcaagcaacattttggagcttctgacctcttctgcggccgcactgtacttgtttgccagctcaatgactttatatgagtccaacttttgtcccctgccttttctaaattcacgcacaattggatgttttatataaatgattataaataattcggcatgtatccgaatcgtacaaaagaaccttttcataagaattggaagggcgtatattcacttaaaattcacagttggtgagactttaagattacaaaaaaggtaaaaaaaacaaatccctcagacataaggcaaatgagaaatttcccgctctatgggaaaaaacactaaagttgatcaaatgacctaagtgcgccaaacgtgttacgggacgggctatctcatggtataaatggaattgtaaacgttatcaaggaggtcgtcatatgaagaaaaaatcattctcaatcgtaatagcgggcggagggagcactttcactccagggatcgtactcatgctcttggaccatttggaggagtttccgatcagaaagctgaagctgtatgataatgataaggagagacaggatcgaattgcaggcgcctgtgacgtttttatcagagaaaaagcgccggatattgaatttgcagcgacgactgacccggaagaagcttttacagatgtcgattttgttatggcgcacatcagagtagggaaatacgcgatgcgtgcgcttgatgagcaaattccgttaaagtacggagttgtcggccaggagacgtgcgggccgggcgggatcgcatacggtatgcgttcgatcggcggtgtgcttgaaatattagattacatggaaaaatactcgcctgatgcgtggatgctcaattattccaatccggcggcaattgtggctgaagctacgagacgccttagaccgaattctaaaattctcaatatctgtgatatgccggttgggatcgaagaccggatggcgcaaattcttggcttatcctcaagaaaagaaatgaaggtccgctattacggattaaatcacttcggctggtggacatcaattcaggatcaagagggcaacgatttaatgccgaagctgaaggagcatgtatctcaatacggctatattccgaaaacagaggctgaagcggtggaggcgagctggaatgacacattcgccaaagcgcgtgacgtgcaggccgcagatcctgatacactgccgaatacgtatttgcaatattatttgttcccggatgatatggtgaaaaaatcaaatccgaatcatacgcgggcaaatgaagtgatggaagggcgcgaagcttttattttcagccaatgtgacatgattacacgtgagcagtccacagaaaacagcgaaatcaaaatcgatgaccacgcatcatatatcgttgatcttgcccgggcgattgcctacaacacaggtgaaagaatgctgttgatcgttgaaaataacggcgcaattgcgaactttgacccgactgcgatggtcgaggttccatgcattgtcggctcaaatgggcctgaaccgattaccgtcggcaccattccgcaattccaaaaagggcttatggagcagcaggtatccgttgagaagctaactgttgaagcgtgggcggagaaatcgttccaaaagctgtggcaggcgctaattttgtcaaaaacagtgccgaacgcgcgtgtggcaagactcattctcgaggatttaatggaggccaacaaagacttctggcctgagcttgatcaaagcccgacccgtatatcataactgaaattcccccattttcgaatctgtaattgtatataatagaaagaaaatggggggatctgatatgcagctcgaagaactgatcaatcagcactacagcaaattgaatgacaacgattttcatattttaaaatatatattgaatcataagcacacatgctatcaccttggaatcgacgcgctggccaaagcttgcagtgtatcgcgttcctcaattttacggcttgcccaaaagctcggtttcagtggctacagtgaatttcgcgtctttttaaagtgggaagatcagccggaagaaggcgagagtatgagttttgaaaagctgcttgatgatattgaagcaaatttgaagttcttacggacaaaggacatgacggacatgtgccagctgattgatgaagctgaccgcattttcgtctacggttctggaaatgcgcaaaagatatgcgcccgcgacctgcaaagaatgtttattccgcgccatcgctatcttattttaattgaagacacaaatgaatttaatttgatgcgcgatgattttaaagtaaacgatctgtttatcatcatttctctttccggagaaacaccggagctgattcctcaggcaagaatgctttctgcaaagggtattccctttatttccattacgaatttaaaaaacaatgtcctcgcccagctgactccgcataatctttatgcgacaagcaaacctgtgacattaagcgataaaacggaaattgtcgcttttgcaccgttttttctcgttggcgaagcattgttccgcgcatatgttgattacaaagaggcagaaaaaaatgacaatgagtagcagggggttctggtatgatgcaaaaaattcagcgctttggaagcgcgatgtttgtgcctgttttattattcgcgttcgccggcattatcgtcggtatcagcacgctctttaaaaataaaaccctcatgggcccgctcgccgatcccgacggtttttggtatcagtgctggtatattattgagcagggcggctggactgtttttaaccaaatgccgctcttattcgccatcggcatcccggttgctttggcgaagaaagctcaggcacgcgcttgtttggaagcgcttactgtttacctgacattcaactattttgtcagcgcaatattgacggtatggggaggagcatttggcgtcgacatgaatcaagaggtcggcggaacgagcggattaacgatgattgcgggcataaaaacgctcgataccaacattattggagccatctttatttcttcgattgtcgtctttttgcataaccgctattttgataaaaaactgcccgattttctcggcatctttcaaggctcaacatatatcgtgatgatttccttctttattatgattccgattgccttggctgtgtcttatatttggccgatggttcaatcgggaatcggctcgcttcaaagctttctggttgcttctggggcggtgggcgtttggatatacacgtttttagaacggattttaattccgaccggccttcatcactttatttacacgccgtttatttatggcccggctgtagcggaaggcgggatcgtcacgtattgggcacagcatctcggcgaatattcgcaaagcgccaaaccgctgaaggagctctttccgcaaggcggattcgcgcttcacggcaactcgaaaatcttcggtattccgggtatcgccctggctttttatgtgacagccaaaaaggaaaagaaaaaactcgtcgcagggctgctgattcctgtcacactgacagcgattgtcgccggtattacagagccgattgagtttacgttcttattcatttcacctttcttatttgcggttcacgccgtgcttgccgccacaatgtcgacagttatgtatatggccggcgtcgtcggaaatatgggaggcggactgattgaggcggtaaccttgaactggattccgctctttggcagccacggtatgacatatgtgtatcaaattttgatcgggctctcgtttacagcaatttattttttcgtcttcagatttttaatcctcaaattcaatatcgctacaccaggacgggaaaaggatgaacagcaggaaacaaagctatattcgaaaaaggaatacagagaacgaaaaaacaaggatgaaacggcctccgctgctgaaacggctgatgacaccgcttttctgtatattgaagcgctgggcggaaaagacaacatcactgaagtcacaaactgcgccacccgcctcagagtcagtgtcaaggacgaaacaaaggttgaacccgacagcgtattccgcgcgcttggcgcacacggcgttgtcaggaacgggaaggcgtttcaggtaattatcggattaagcgtaccgcagatgcgggagcgtgtggaaaaaatattgaatcaataaagactgccctccttttcgggagggttttcgtttgccgtcaaaaagaccgccatagtaaagtaaagaaagagacaatcgagtaaaaaggggtttggaggcttttacatgcaaaaggctttgtcgtttttaaaaccatattcattgctggcgggaattgcgctgattcttatgttgacggagcttgcagttgaactgctgcagcctttattgattgcgaaaatcatcgacgatgggatattgaagcaagatctgcggcatgtttggatatggggcgcggtcatgatcgggctgaccgtgttatcctttgcggcggggatgctgaattccttttatgccgcccatgtcagccaaagcttttcctatgatacgagaaaagggctttttcaaaaaatccagtccttctcctattccacatttggacagttttcgtcctcttcttatattacaagactgacaaacgacgtcacacaggttcaaaatatgatttttatgagtttgcggtttatgctgcgggcacccttaatgattgcaggcggcattgtgctgtcgcttgccgttaatgtgaaactcggcttttttctgcttgtgaccattccgatcctgatcttgtttttgctatgggtattaaggaaaggcggggcactgttccgctcagtgcagaaaaggctggatcaagtgaacaccatcatgcaggaaaatttaattgcaatcaagctgatcaaagcgctgcttcgcggcagccacgaagtcaaacgatttatcaaagccaacacaaggctgatggaaaaaacggtttcggcctttcagcttgtggaattcacgatgcctgtactgatgcttttgatgaatctctgcatccttttgattttgtgggcggggtcctacagtattacgagcggaagcactcaggttggcgatgttgttgcgataattaactacgcaacacgaattacaggcgcgctttcgatgtttccgtttttgattatgattttcacccgggcgaaggcttcaggggatagaatcggtgaggtgcttgaaacagaaggcgacgagcgggaggaaggcaccatatctgatcgtttgtcaggacggattgagtttcagcatgtatcctttcgctatcctgaaatggacagagaagcgctcaggaatgtctcattttccgcaaagccaagagaaacgatcgcgattctcggtgcgacgggctcgggcaagtccacgctttttcagctcattccgcggctttatcagccggattcaggccgcatttacatagatgaaaagccggttcaagatattccggctgaagggctgcgcaggcaaattggatatgtaccgcaggaagtcctcttgttttccggcacaatcaaagaaaacatcgcttggggcaaagaaaatgcttcactagatgaaataatggatgcggccaaacatgcgcaaattcatgaaacgattttgaagctcccaaatggatatgacacagttttggggcaaagaggcgtcaacctgtccggcggccagaaacagcgaatttccattgcgcgggcgctgattcgaaaaccggctatccttctattagatgacagcacaagcgcacttgatctgcaaacggaggcgaagctgcttgaagcaatcagcacataccattgcacaactttgatcattacacaaaaaataaccacggcgatgaaagctgatcagattttgctgctagaggacggcgaactgattgaaaaaggcactcacagtgagctgctttctgaatctcagttatacaagcgcatttacgagtcacaattcggaagggaggggagcgagtcatgctaaaagacatccgcaagcctttccaatatcccaaactgccaattgacaaaaaagaaggcgcgaaaaagcgggccaaagcaaaggatacaaagggcacactgagacgaatctggtcttacttggctgaaagaaaaggactgctcatacttgtcatgctaatggttgtcatcagcgccatattcggactccttggtccctttgtgatcggaaaggccatcgaccattttatcgtcgggaaaacggtcagcggcttgattcctgttttgcttcttctgcttgctatctatatcattcagtccctgtcgctttggtttcaaaactattggatgattacgatctcgcagggcacggttttcagaatgagaagcgaattgttcacccatctgcatgagctgccgattccattttttgataaacagcggcacggcgagctgatgagccgggtgacgaatgacatcgaaaatgtcagttctaccttaaatacgtcagtcattcaaattttgtcaagcgtgatcacctttgtcgggaccattgcagtgatgctgtacatgagcccgctccttacattgattacgctgaccattattccggtgatggcagcgagcctgaaatggatcaccaaccgaacgggaaagctgtttaaagaacagcagaaaaaccttggtgatctgaatgggtatattgaggaatctgtttcaggcgcaaaggtcatcaaagcatattcacgtgagaagcagattactgctgaatttctcgaaaaaaacgctgcactcaagacgtcgggcttttgggcgcagacgatttccgggtttatcccgaaggtcatgaactctttgaataacttaagctttacaatgatagcggcaatcggcggtttgtttgcgctgaaaggctggatctcgatcggctccatcgtcgtctttgccgagtattcaagacaatttacacgccctttaaacgatctggccaaccagtttaatacgatgctgtccgcaatcgccggcgctgaacgggtgtttgacgtgcttgatgaaaaagaagagcgcgaggatgaaaagaacgccgtgcatcagcccatccaaacaggcagcattgaattccgggatgtgtccttcggttacgataaagggcagcagacactgaagcatttacagtttaccgtgcctgccgggcagtccatcgcgtttgtcgggcctacgggggcgggaaagacaaccgtcactaaccttctcgcccgtttttacgagcctgacaaaggaaaaattttaatcgacggtacagatattaaaacccttactagagcaagcctgagaaaaaacatggggtttgttcttcaggattctttcttatttcagggaacgatcagagaaaacattcgctacggcaggcttgatgcttctgatcaggaagtcgaagccgctgcaaaaacagcgaatgcccatagttttattgaaaggctgccaaaagggtatgacaccgtgctgacgcaaaacggttcgggcatcagtcaaggacagaagcagttgatttctatagcgagggcggtgcttgctgatccggttcttctcattttggatgaagcgacaagcaacattgataccgttacagaagtcaacattcaagaagcgctcgcccgtttaatggaaggaagaacaagcgtcatcattgcccacaggctgaacaccattcaaagagcggaccagattgtggtgctaaaagacggtgaaatgattgaaaaaggcagccatgacgagctgattcggcaaaaaggattttacagtgacttatatgaaagccaatttgagaaatagacctttgtcctgcacagaggtcttttttgttacagttttatagtacttttatttcattttcgtaaaatgtaacaaaattacttgacgtaaacaagttatgtatatatactagcttacattaagtaagtgataacatttatcaaggaggataaaatgaataaatcatttgaaattggcacattacttttaagagttattacaggtattatcttttttgttcacggtttatcaaagtttcagggaatggagggcaccatccaatttttcggcagcataggccttccaagctttatggcgtatgtcatcgcagcgattgaactcattggcggagtgcttgtcttcttcggattggctacacgtattgtcggtgtactgttcgctcttacactgatcggcgccatcatcactgttaagctgaaagcgccattcatgggcaatgcagaatttgattaccttctgcttttgacatccattcacctggcgcttactggaagtcgattcctggcgctggacccatttgtgtttaaaggaaaaaagaacgaaaacgtttcagcataagaaaagaggcatgcagcatgaccagcattcatgaggatacacacattggctatgccaaactcacaattcgcagtctggagcgttcgcttcagttctactgtaacgtcatcggttttcaagtcttaaaaaagacggatcgccaagcggaattaacggctgacgggaaacgcgtactgcttattcttgaagaaaatccgagcgctgtcgtcttgcctgaacggtctgtgacaggcctttatcactttgcgattcttcttccggacaggaaagaacttgggatcgcgctcgcccgcctgattgaacacggcattgctatcggacatggagaccatgctgtcagcgaagcactctacctgtctgatcctgacggaaacggcattgaaatgtacgctgaccgcccccgcagcacgtggcagcgtgatcgggaaggaaactatgtcatgacgacaaccgctgttgacattgagggccttctggaagaggcaggagatgagcggaaaacatcgcttccgaacgatacaatcatcggacacattcatctgcatgtcagtgatttgaaagaagcaaaggcgttttatacagatgtactgggctttgacattgtcggaaactatgcgggcatgtccgccctcttcgtttcagccggggggtaccaccatcatatcggcttaaacatttgggcgggaagaaatgcgccgcctaaaccgacaaatgccagcggactagattattatactgttgtcctgccccaccaagaggagctggatttggtggcaaaccgagtcaaacacgccgggtattcgattgaagagacggaaaacagctttcgtgtgaaagaccctgtttccggcgcctatattacatttgtgatttaactgcaatccccttgccgaaaaaacggcagggggattttttattttccagaaactcctgtcaaaaatgccctgaggcaggtatgataagaagggaattgggtatcgggagtgatgagcgtgaaagctcttttttttacgagaatgttcaccttgatggtgagctgtttaatgtatctgtccattgtgaaagaggataactggtttggatatgtatttatagcagcaggtgctgccatgtatgcagccaatcatgttttgctgacaaaagagacaaatgccatctggttctgcctgattgatattgcaatcggcttttctttcggatttatctttcccggcacaggtttgttcattattatgctttgtccggttgcggtcgccttttttctgcggaggtttcctaaaagaacagcatggtctgtcttatgtctttcctctattttatttttgaccgtcctcatccgtacatatgcgatgttcggcaatgaatttgtcattgatcatttgactagcatgacattcgttgtcttctgcggtgtcgtgggcaaattaatccgcaagctgttggatgcgcaggatacggcaaaacagcagtttcaggaactgacggagtcccatctggcgctgtctgctgcacatcaggagctccatttatatgcgaagcaggttgaagagctgactgccatttacgagcggaacagaatggcgcgggaaatccatgatacagtggggcataaaatgacggcccttctcgtccagctgcagcttttgcgtgaatggcaaaaaagagacagccaaaaagcggatgagacagtaggtgtctgtgaaacacttgcccgtgaagcgcttgatgatgtccgcttatcagtacgcaccctgcaaactgaaaacgatccttcgctaatcgaatcgctgaaacagctgacagaggacttttgcaaaaatgcaggagtcacaacagaatttgcggtcagcggtgatcctgcaatcatcccgctgtctctccatccgaccctgatcagaacggcgcaggaagcactgaccaatgccaaacggcacggcggcgccgcagcttgttcgatacagcttgcctgcacaacggacagcatcagccttgtcattaaggatgacggcaaaggcaatcccgaggcagcacttggttttggtctcttgaatatgaaaaagcgggcagcggaacatggcggaatgatccgctttgaaagcgaacaggatcaaggatttactgtgaatgcagaattttcacttgccaataaaaaatggagcttcaggcccgtgcagcaaaaggagagtttattatgattaagatcatcattaccgacgatcaggatatcgtcagagaagggctggcatccctgctccagctcagagaagagctcgatgtgatcgcaacagcgcgaaacggacaggaagccttcgaaaaggcgaaagagctggagccggatatcgtattaatggacatccgcatgccggtttccaacggggtggagggaacaaaattaatcacaagctcattgcccggcgtaaaggttttgatgctgacaacctttaaggattcagcgctgattgctgaagcgcttgaagaaggagcaagcgggtacctgctgaaggatatgtcggcagatacgattgtaaaagcggtgatgactgttcattctggcggaatggtgcttccgccggaattgactgcccaaatgctgaatgaatggaagcgtgaaaaacagctgaaaggaataaaagagatagaaaaacctaacgagctgctcgacctgaccgagcgcgaaatcgaagttctggctgagctggggtacgggctcaataacaaagaaattgccgaaaagctttacattacagaaggcacagtcaaaaaccacgtttcaaatattatcagcaagctggctgtcagggacagaacccaagccgccatttactcggtcagatatggtatatctgtcttttgacatatgacgttttgcatatatgcttctctgaaaaggccttttacaggcctttttttcatgccctatgttctatctgccgctacatgccgcacgcctttctttcttctacaatggcaatggatcaaaaaaaggagtgagacgacgtgctgcaagcagaaaacatcaaaaaggcatatggaaaaaaaacaatcgtgaaaggtatttctttttccctccaaaagggggagtcgttcggtctgctcgggccaaacggtgcggggaagtccacaaccatttcgatgatttccggccttgtgccgcatgacagcgggaacatcacggtgggcggctatgtcatcggaaaagaaacggccaaagcgaaacaaaaaatcggcattgttccgcaggaaattgcattatatccgacgctgacggctcatgagaatcttatgttttgggggaaaatgtacggacttacgcacggcgaggccaaaaaaagatcggctgaggtccttgaatatgtcggtctgactgagcgggctaaagataagattgaaacgttctccggggggatgaaacgaagaatcaacatcggtgcggctttaatgcataagcccgagctgctgattatggatgaaccgactgtcggtattgaccctcaatcgagaaatcacattttagaaacggtcaaacagctcaacgaaacgggcatgacggtgatctatacgagtcattacatggaagaggttgagtttttatgcgatcggatcggaattattgatcagggggaaatgattgcgattggcacaaaaactgatttgtgcagccgccttggaggcgataccatcattcagctcacagtcagcgggatcgatgaagcgtttcttttggcgatccgttccctggctcatgtgaatgatgtaacagtccaggagtcagagctcaaaatcgacatttctgcggctcatcatgagaaagtcgtcaccagtctgcttgctgaagccgctgctcatcatataaacctgctgtctcttcaggtgcaggaaccgaatctggagcgcctgtttttgaatctgaccggccgcacgttgcgggattaggaggggcggcaatgaaaaaaagcatatggatcgcatggaaagatgtcaaaatcagaatcacggacagaaaagggtttatgatgcttatcctaatgccgctgatcctaacgtgtattttaggggcggcgctcggatcagttgttgacggaggcaaccggattgatgacatcaaagtcggctacattcaatcagaccagtcagatgcagcgaacatgtttacaaaagatgttctcaaaaaaatgaagtcgataaaggccacaaaagccggcagcgaagacaagatgaagaagctgattgatgaaaagaaaatcgatgtaggcatcgtcatcccgaaccattgggaagccggcaaaacctcagctgttgtttatgccgcacctgatcaaacattgaaaagttccatcatcgaaacagctgccagctcttttatagagcaatataaagcggtaaaggaagccgcgtcagcctcaatggactacatcagcaaaacggaagctgtacagcaaggaaaacttgaccctgcacagtttgcagaaaagctggcaaagacgctagaaaaagaaacaggtgacaagctgactattgcagaaaaatctgtcggcagcaaggccgttaccagctttcaatactattcggcggcaatgctttgcatgtttatgctgtttcatatgacagtcggggcgaaatcgtttttacaggaaaaggatacggagacgcttgccagaatgctgatgacgcctgcgcaaaaatccgtcattctcttcggaaaatggcttgggacgtatctgtttgctatcatacaatttttcatatttctgatcgtcacaatcaatgtatttggtgtggactggggcggtaatctgctgtttgtgagtgtactcgggctttcttacgccgcagctgtatctggtatttcaatgctgcttgcgtcgtgcatcagcgatatgaaatctgcagactcgataggcggcttcggcattcaattgcttgcggttctcggcgggtccatgctgccgctgtaccaatttccggacgtcttgcagtctgtatccaaagcggtgccaaatcgctgggcgcttgacggctttctttctttaatggaagggggaggctgggctgaccttcaaaagcctgtgcttctttttgcggcgatcggcttttgttcacttgtaattggtatcagacggcttcatacaagataaggaggtacaaaaggtgaaaaaaattctagccatttgcggcattgagctttctctcatttttaagaagccacagaactatttgatcatgtttgctgccccgcttttgcttacctttgtatttgggagtatgctcggcggcaatgatgataaggtgcggcttgcaatcgttgatcaggacgatacgattctctcacagcattatattcggcagctgaaggcacacgatgatatgtatacattcgaaaacgtgtctgaaaacaaagcgtcagaaaagctgaaacaaaagaaaattgccgggatcatcgttatttcccgctcgttccagacacagctggaaaaaggcaaaaaccctgaactgattttccgtcacggccctgaactgtcggaagcgtcgatggtcaaacaatatgcagaaagcacattggcaacgctcaatattcaggtgaccgcggcaaaaacggcatctcagacagcgggagagaactggaaggcggcgtataaaaccgttttcgccaaaaaacatgaagatacagttccggctgtaaaacggcagacgctcagtgataaaaaagagggcgcggaagcaagtgacacagcctccagagcagcaggtttttccatcctgtttgtcatgctgaccatgatgggagcggctggaaccattttagaagcaagaaaaaacggcgtctggtccagattgcttacagcctctgtcagccgagtggaaatcggtgctgggtatgtgctgtccttctttgtcattggctggattcaatttggcatattgcttctttccacccattggctgtttgccatcaactgggggaatccggctgcagttattgtattagtgtcactttttctattgaccgttgtcggcattggattgatgattgcggccaacgtcagaacgccagaacagcagcttgcgttcggcaacttgtttgtcatcgcaacatgtatggtgagcgggatgtattggccgatcgacattgaaccgaaatttatgcaatccatcgctgaatttcttccgcaaaagtgggcgatgagcgggctgacggagattatcgctaacggtgcccgcgtcacagatattctcggaatctgcggcattttgcttgcatttgctgcgatcactttcgcagcggggctgaaagcgctccgagcctaaaaaacatctgccgtttaggcagatgttttttagcatgtgggtacattcgtatgggtgtagcctgaactgcggttaatccttatctatcatagctaaaattgattccagccaagaaacgtaatttttctcccgctccagcgctttcgttagcacaagatagtggccgaagtccggtgaagaaaatgacatcggctctgctgaagccataagcttttcatagcttccctgtaagtcagaaagcttggcctgtcgtttttgcagctggtctttgaacaaatcagaagcctcctggcgcgatagacaagaaatgaaataagccttcagcataaattcatccttcaccgtctcgggtatcggctggtggcggatcagccagtcatgcagttcctgctttccgctgtctgtcagggtgtacatctttttctccagctttgtgccctgaatcgttgtccgaaacgtgataaatccttcatccgtcagctttttgagctcagggtaaatctggctgtgcttggcgctccaaaactggccgagctcctctttaaaataactcgtaatatcgtatccactcaattcgccttttcgcaaaagccctaatatggcgtattttaatactctcatgctatcctccgtgtctggctgtttcgcaaaacagatgagccggtgctcaactgtgattctaactgcctattccccttattatagaaaagggaggaagggaacacaaccgggctctttggaaatgaagataaaaggtttgtcagaaggtatccgatttatctccgtcaatataaaagagatttaaatttaattttcagaaaaaatagtaaccatattgattttttatgtataataggaaattggtggtatgaacatgttaagggggaataaacgtgaaaaaagtacttatggcattcattatttgtttatcgctgattctatctgttttagccgctccgccgtctggcgcaaaagctgaatcagtacataatcctgtcgttcttgttcatggaataagtggtgcatcatacaactttttcgctattaaaaactacttaatttctcaaggctggcaaagcaacaaactatacgcaattgatttttatgataaaacaggaaataacctaaataacggcccgcagcttgcttcatatgttgaccgtgttttaaaagagacgggggcaaaaaaagtagatattgtggctcatagtatgggaggcgccaatacgctgtactatattaaatatttaggcgggggcaataagattcaaaatgtcgtaacgcttggaggggctaatggtttagtatcatcaaccgcgctgccgggtacagatcctgatcaaaagatcctctatacatctatttacagtctcaatgatcaaattgtcatcaatagcttgtctcggttacaaggagcgcgaaacatccagctttatggcatcggtcatattggcttgctctctaatagccaagtgaacggctatatcaaagaagggctgaatggcggaggcctcaatacaaattaatatcttcaaaaaacaacctgctgtctccgttacagtgggttttttcgtctgagaaagccatagggtcttatgaccttagtctatcatgcatacgtcaatttatgacatcaggcactttttcaaatagagcggacatgttaaggtacaaccatcgatttctatcaatttgaaataaaaggagcgctgttatgcaaattaaagaaatttttatgatccgctgcatttcgtgcttaagtgtcgtcttgctccatatcatttcaatggtcctgatgcttcaggcagaagctcttgcagatatttctcacactgttgattctttccgcacactcctgatgttcagcacgcccgcttttattttcatctctgaatttttactggcccgttcttatcctgatggggtgcctgacggttttttaaagaagcggggaaaagtgatttttgttccttttttatttatcgcggccatcgatgcgctgctgatgaccagtgcgatggggggagaggtaacctttctcgcgtttgtgcaaaaatatctggcgaacgttttcttaggaaactttatcggatacttcattctcgtcatctttcaattttacatgctgcatatgatgtttcatgagtacttgaaaaaagcatcgccgaaatgggtgctgtctatctcatttgtggtgacagccgcttatttaggctatttctccgcagccagcccggctcctgcttctgaagagggaggggcatttccgttcttctgggttccgttcgcaggctggcttttctacttttgtctagcctactattgcggaaaagaatacaagcgttttttagcgctgctgaaccaataccgctgggtggtgtacggcggcgcaattgcttccggggcgctggttgtcactgtttcttatgtgggtgaaatcggcatgatcagctcgaagcggcctgatatcatgctgtattcaacaagcatgattttcctgtgttttcacttgttttccaaaatgaagcatgtgccgaaaatcatgatgtttatcagcaactattccttttcgatttatctgcttcatgcctattttatgattataggctacgtgttgcttttgaatatgcccgacattcctgccgtaccggctgttctcctgttgtttgccgtgtgcacagccggcccgattatgacttcatgggcgctgaataagttcaaatatgggtatttatttgtggggaaaatttatcagccaaaacagaagaaggtaacagtcgaagtgcgtgatcacgcagggtgaaaaacaagcggcaggggggatcctgccgcttgttgtgtattaaaacatacagtatacacaatctttttcttgtaaaataaaggagaagagtgaatagaagggagaacattcatgacatcagtcaatctaagctacccaataggagaatacaaggcgagggaatccgtatcgaaggagcaaaaagataaatggattcaagtacttgaagaagtgccggcaaaattgaagcaagctgtagagggcatgacggacagccagcttgacacaccgtaccgggacggtggatggaccgttcggcaagttgttcatcatctggctgacagtcatatgaacagctatattcgttttaaattgagcttgacggaagagacaccggctattcgtccgtatgatgaaaaagcatggtcggagctaaaagactcgaaaacggcagatccgagcggctcactcgcgcttttgcaggagcttcacggaagatggacggctctgctccgcactctgacggatcagcaatttaagcgcggattttatcaccctgatacaaaggagatcattaccctggagaacgcgctcggcctgtatgtctggcactcacatcatcatatcgctcatattacggagctttccagacggatggggtggtcttaacgcttttgccggcggaaagccggaatactgatagcagcaatcaccagaagtgagatcacagcagccgctgcatataactgatcatagccgctggcgacactcgcatgaatggcgtcgcttatcgcggttttgacttcaggaacgggaatgcgttcgatttgttcttgtaaagaagaaacatcagaactgtcgatctccggaatcatctgcatcgccttttctgaatatccgctgtccgataagcggctgttgatctcatcacctatttggtcaaacccggctgtgataaaacctgcataaagagtaggcgccaaggtcagtccaatttgccttactaatgaaagcgtgccaagagctgtacccttatttgtttttgccgcttctgatacaaggacgttcagcggagcgcctaacagaaagccaaaaccgatcccagctgccacacttgcgatcataaactcccatttttccgtcacccagaacggaaataaagcaaaccccgcacatgagatgattcccgaaagaataacggtttttacaggacctttttggtcggtaagcgctccgccaagccaagcgccgattccggaagccaacgcaagcggtgtcatccaatagcctgcttttgcggcagggacacccaaatactgttcgacatatgacgggataaaaatgactgccgccaagagccccccggataacaaaccgatgataagcgtgcgctgaaacatatggtttcgcagcagagaatacgccaaaatgggatcgcctcctcgcatttcaactctcttttcatacgagataagcgctgcaaaacagagtatgccaaaaataatacatccataaacctccggattccccaagctgtgtaagagatttgccccgtcaagattggtcatgccgtacatcacagctaaaatcgacagggacaaaaggaagattccggccgcatcgaggcgcttagcctcaggtgcttttgtttccgcgataaaacatgcgccgaaaacaaccaatagcacggcaatcggcaaattaatcaaaaacagccaatgccaagacccggtccaatcaagcagaaagcttccgatatttggcccgagcacagcggccatcccgttcattgcgccaagcagcccaagcgccttcccttgtttttcctttgggagggtcgcgagaatgtgagagctgccgatgatgaaaatcccgccgcctccaagcgcctgaatcagccgcgatatcagaaagagcgggaagctttggctcaaagcaacaagcaaagaaccaagtccgaacaggcaaacctcaatgagaaagagtttttttctgccgtagcggtcggaaagctttccgacgattggcacactgacgctaagaccgagcgtataaagggtaatgccccatgatccccaggaaggggaaacggaaaacgactcgtttatcgttgttaaggcagctgaaataattccgttatctagcgcagccataaatacaccaatcgtaaacaggctgatcgcccacttttggcctttctgctctgttaatgcttcagacatattcatcaacctcctttttattcactcaaagtatattattcattttaaatgaactaaatgtcaaataaaaaaagcctgctcccgcagtttgcggatgacagacttacagatttattcttttttcgctttctctaatgctcttgaaaggatagacagcccttcggaaaccgcctgcttttcttcaggggacagcagctctaatgaacgcttcaatttcaggtggcctttttcatacaaaccccggaaaatatttttcgcattttctgtcaactgaacaactacagagcggcggtcctcttcagaatgtgagcgtttgacaaaccctgatttctcaaggcggtcaagcagcccagttgtattggacagggaagcccccattttttcagcaatgtcgctcactttcaatgttccatggttgtttaatagcatcagcactttcatttgcggcatgctcatatccagcttcatccactcggacacatcaccgaggccggcggaagttaagactttcatatagagcacccatatttcccgttcctccgatgaaagaatgttttcgtttaatactgttgtatcgtgtaaattatattccatttcatcacttcctcatcattcactcctcttaccatattactcgattttcactcctgaaagaaagtgagcagaaaccgcatgcgggactttgtccgaaaaataacggtagtgtataatgagttggagattattgggggagaggatcgaactagaatatgattggagagaccattgctgattaaaaagaatgctttatcaatattaaaaatcgtttttcctattgctgttttgctatttgttatttatcaatcgaaaaaagaactgacaaatctgtcattcaaacgtacgctcatggtcatcaacggactggaacgaactgacttatttatgcttgtgttgatcggcttgctggctgttgcggccatgtcgctgtatgattacgtcctgaaatactcacttcgcctatcgatcacaaacggaaaagtattcagggtttcctggatcgccaattcatttaataatgtgctgggcttcggcggtttagccggcgtcgggttaagaatgatgttatataaggagcatacgaaagaccataaggcactcgtgaaaggaatcgcctggctcacatcatctatgctgctcggattatctgttttcagcattttcgtcgctgcgagaatgctgccagtggatgaagtgattcatgaaaagccttggctatgggcggtcgttatcggttttgcgctgatattgccgctgtctttggcggtgtccaaaataaaagaccgcaaagctggggacgaagagaatgcggacaaagtgaaaaatccgattttcgcatatattggagcttcagttgttgaatggctcatggccgggatcgtcatctattttgctttgttcgctatgggcattcatgcagatatcaggtatgtgttcggggtgttcgtcattgcggcgatcggaggaatgatcagcctcgtgccgggcggcttcggctcgtttgaccttttatttttgctgggaatggagcagcttggctatcatcaagaggccatcgttacttctattgtgttgtacaggctcgcctactcatttatcccatttatcttgggactgttctttgccgcaggcgacctgacggaaaatacaatgaagcggctcgaaacgaacccgcgcattgcaccggcaattgagacgacaaacgttctgcttgttgttcagcgtgcggtattagtgagaattttgcaaggctcgctttcccttattgtgttcgtagcaggtctgattgtcctggcctcagtttccttgccgattgaccggctgacggttataccgcacattccgcgcccggcgcttttgctgttcaacggcctgtccttaagctcagcgctcattctgctgattctgccgatcgagctttataaacggacaaaacgttcctatacgatggccattacagcgcttgtcggcggctttgtgttcagctttttaaaagggcttaacatcagcgcgatattcgtattgccgatgattatcgtattgcttgtgctattgaaaaaacaatttgtccgcgaacaggcatcctatacactgggacaattaatattcgctgtggcgctgtttactgtggcgctctttaactacaatctgatcgcgggctttatttgggaccggatgaagaaggtgctgcgtcacgaatatttcgtccacagcacctcgcatattacacatgcaaccatcatggcgatcattattgtgccgctgttcttcttgatatttacagtggtctatcataagagaacgaaaccgatcggagagaaagctgatcctgagcgtcttgctgcgtttctcaatgaaaaaggcggcaacgcgctgagccatctcggttttcttggagataagcggttttatttttccagcgatgggaatgcactgcttctgtttgggaaaatcgccagaaggctggtcgtgctcggcgatccgtctggccaaagagaatcattcccgctcgtgctggaagaatttctgaacgaagcgcatcagaagggattcagtgttttgttctatcaaattgaacgagaggacatggcgctgtatcacgattttggctacaacttctttaaattgggcgaggaagcatatgtagatttaaatacatttaccttgactgggaagaaaaaagccggccttcgggcaatcaataaccgctttgagcgggaggagtatactttccatgtggatcatcccccattttctgatgcgtttttggaggagctgaagcaaatctcagacgaatggctcggctcgaaaaaagagaagggattctcgctcggattttttgatccttcctatttacagaaagcgccgatcgcctatatgaaaaatgcagaaggagagatcgttgcattcgcaaatgtcatgccgatgtaccaggaaggagagatatcggttgatctgatgcgctatcgcggcgacgctccaaatggcattatggacgcattgttcatccgcatgtttttatgggcaaaggaagagggctgcacgtcttttaatatgggaatggcacccttggccaatgttggcactgcctttacatccttctggtccgaaaggtttgccgctgtcatttttaataatgtcagatacatgtacagcttcagcggcctaagagcctttaaagaaaaatacaaaccggagtggcgagggaaatacttggcgtatcggaaaaacagatctctttctgtcaccatgttcctcgttacacgtctgattggcaaaagcaaaaaagactccgtctaataagacggagtcttttttttatttcgtttttaagaagtaggtttcaatatcatcaagcagatagtttgcggctttaattccgcctgcggttgtccacacgacgtcatcgacttcatgtgcattacctgacttcacggcctttaggtttttccatagtgaactgcttgtccactgattggcccatttttcattttcctttgcattatcggctttataagtgaaataaaacagcacatcagcatccatatcaggaatagattctttactgtcggttgagaacgtaaattggtccttttgtttcttaaacagctccacttgtttttcagggcgtttgaagccaagctggtctaaaataatcccaggaaatgaatcggtataatagattcttgactcaccggataaaaagcgtacgacagaaacggttttgtttgtctggtcgcccagcttgttttttaaatcagaaacgcgtttatcaaaatcggcaatgacttccttgcttttgtccgccttattcaccgcgttggcgtatagagtcaggttatccttccagttcccggccaaagattcagcaaaaacagtcggcgcaatcgcatttaactgatcataaattttctcctggcgcactttgtttccaataatcaaatcaggctttaattctgcgatggcttccacattcggttccgtttcaagaccgacgtttttaacacctttcatgtcatctttcagatagtcataccacgggtcgcccttccatgactttacggctccgaccggcttaatgccaagcgctaagagcgcctctgttccttcattagttaaaacaacaatccgttttggattggcggggatgttgtctgatgtccccattgcatgtttgaccgttcttgttttgctgcttgacccctcgctgttgcttgaactttctgaactattacaggcagaaagtaccataaaggccattaaaaatacgaatagcatgctgatatgctttttcatctttttcctcccaatattgaaattcattatcatttagatcataataagcagtgttaagagtgtcaatccctaattgaggattattctcaaaaacaaacattacatagtaaataactaggagaatattagatcatgatctgcaaaaaggcatcttcaaaatggattgtgttagtatgtctgattttcattttactggcggctgtctgcgcaagcgtcgtgtatggctatacaggtacgtcatggagacaggtctatcaggcgtttacttccttcaacggaacaaatgagcatgtcatcatcaaggatgtcaggcttccgcgcgctttggttgcgacagtcgtcggcgcctcgcttgcagccgcgggcgctctcatgcaggcgctcacaaaaaatccgcttgcgtcaccggggattttcgggattaacgccggtgcaggtttttttattgttgccggatcgttttttctgcatattcagtcacctcaggcgctagtatggagctcgtttcttggggcagcatttaccgctgcgatcgtctatgcagcaggctcgcttggaagagaaggactgacgccaatcaaactgacgctggcgggagctgccatggcagccatgttttcttctctgacacaaggcttgctttctgtcaacgaactcgagcttgcccaggtgcttttttggctgactggctctgtgcagggccggagtctggatctgttgatgacgatgtttccatatgcagcggcagcgctggtaatctgcttctttctcggccaaaaaattaacctcctcgttatgggagaagatgtggcaaaaggactcggccaaaaaacgggcctgctgaaatttgtgatggcgctttgtgttgtcatgcttgcagggtccgctgtcgccattgccgggccgatttcttttatcggcatcattattccgcattttgcccgctttgtcgttggtaatgattatcgctgggttctgccattttccgctgttttgggtgccattttgcttgtttgcgcggatatcggtgcgcgatatatcattatgcctcaggaagttcctgtcggggtcatgaccgccatcatcggaatgcctgtgtttgtgtacatcgcaagaagggggcgaagctatgaaacttcgttttggcgttactgcggctgaaaagaaagcatggatcgtctttttgattttactgggttaacagctgcggtactcatcataagcgctggtctcggacaaaggtttattcctccctgggatgtagcaaaaacattctttggtgcaggttccaagctggatgaactgatgatcatgtcgttccgcatgccaagaattttgacggctttatgcgccggtgtctgcttggcagcggcaggcgcgatattgcaggggctcgtcagaaaccctctcgcatctccggatattatcggaataacaggaggagcggcggtagcggtcgtgcttttaatgatgttcttctcagaccgcagcagttcacttacgatcagtctgtcatggcttccagcagccgcatttatcggcgcatcggctgtcgggctcatcgtctatttactggcatacaaaaatggcgcctccacatttcggctggtgcttatcggaatcggattttcaatgtcggcgcaggcgatgactaccctgttgatgatcaaaggcccgatttaccgagcatcacaagccaatgtgtatatcactgggtcagtttatgggtcaaactggcagcatgtaaaaatagctattatcttatctgtcattctcttattcatttgttttgtcgcgctaaaaaatatgaatatacaggtgctgggtgaagatattgcggcgggtgcaggaagcgctgtgcagcgaaatcgttttttcttgctacttttgagtacggctcttactggttgtgcagtttcagttgccggcacaatcggttttgtcgggctgatggcgccccatattgcaagacggcttgtcggctcatcttatggcgcgctgctcccagcgtcggcacttattggagctctgctcgttttaacagctgatatcgtcggcagaaccttatttgctccggtggaagtgccggccggcgtctttacagcggctatcggcgcaccttattttatttatttgctctataaaacaagaaattcttaatcgttacacccattttcttaaaaaagaaaatgggtttttttgataatgactgaagattcgtaattatttttgctatactgacagagacattgataaagaaagggcggcagatgaatgaaagaagcagaggtattaaaatatgaagcatttacaagcagtcccggcaaaggaaaccccgcaggcgtcgttttgcagggagacgattatacggaagacgagatgcagatcatagctgagcgtgccgggtattcagaaacctcctttatccgaaaaagcgagtcggccgatcttgaactccgttactttacacctggacacgaaatgaatttgtgcggtcatgcgacagttgcttctctttacgcattatgtgagaaaagaatgctggagagcggtaaaacgtacagcatccaaacgaaagcgggtatcctgcctgtgaagatttctgaaaaagatggccgtattcatatcacgcttgaacaggcctctccgcaattcaaaccatttacaggcgatcggggaaaacttgcgaccgcactgggtatcaccgatgaagattttcatgaagaccttccgattgtgtttggcagcactggcatatggacagccatcgttccgcttaaatcattggaggcttccaaaaaaatggtgccagataacaaacaatttccggaagtgttaattgatctgccaaaagcttcagtccatccgtttacctttgaaaccgttcatcccgacagcgacctgcacggacgccacttttcatccccgtattcgggaacgattgaagaccccgtgaccggcacagcatccggcgtgatgggggcttatatgaaacattatggaaatgccgagcagcataaatttatcattgaacaagggcaggaaattggaaaagacggaaaagtggagatcgaaatgaacgaagccggcggccatgtgaaagtgaacatgacaggaacagccgtttactcagaaacccgtattcttaaattctaatacggatgatggtttacaaaaagatgcactttccgttattattatgaaatgataatcattttcaattgcataggaaggtgagacggtatgcctcaaaccgaacaaatacatcagcattcagtactgcgggacatcatacgcagcagaagatcgattcgaaagtttaaacaagagccagtaccttcagcagtcattcttgacatgcttgaaacggcaaaatatgcgccaaatcacagagtgacagagccatggagatttatttacgtttccagtgagacaggtaaagcgaacctcatcaatacatttgcagcgttctctaagaaatccaagccggatatgacagaggaaaagcttcaaaatttcaaaaacacacttgggcgcgttccgggatttctgctcgtcgtgtttcaggaagatgaaaacgaaagagcgcgggacgacgattttgcggcaacaagctcgttgattcaaaatctccagcttcttgcttgggaaaaaggaatcggcatggtttggaaaagcggaaaaatcctttatgacaaagaagtccatcaggcctttggtttgcaggataatgagcgtttcgccgccatcatacaaacaggttatcctgacgaggcgccggaagtgaaaaaacgcacaccgatccgcgaccggtttactgaaatgtaaaaagccccttgtctcaaacggagacaagggtttttcattaacgagatttctttttcgctctgttgtcggctgctttcgcacgctcttgcgcttcgcgatcatctgcatcagcaagctcggttgaatattcttcgtaaacgccgtcagtttccctttttaatgtatcgggaacttgtggaagcttttgtttgtttttatcacggtttttgtggatatgatttctgcccatatcaaattccccctaaaaagtgatatcaaacaaatatagtatttggttttaaggggttatgtattcctacttccgcttagcagctttttccgcttttttaaattcgcctgaataaagaacttcctgcatttttttcaggttggcgccttgctggtgcttctccctctttttttccataaaaaggacctccttcaaccatgttattcttaaggttgacgcttcctgctgtttttatacagtctttcggtccgctatcagctgtgagagtgcaaattcaagatccgaatatgtaaaacgaaatccagaggttatcgcttttttaggaagagcgcgctgtcctttcacaatcaaaagactcatttcacccaatgcttttgataaaaagaattccgggacggggagccaatgcgggcggtgcttcacccgtgcaatcgcttttccgaattgcttcatgtccacaggattgggcgcggtgacattcattgggcctgagatgccggcattttccaccgcatatcggatcatctgggccgcatcctcgacatgaatccatgacagccactgccttcccgttccaatcgttccgccggccagaaacttataggggagaaccataagcggtagagcacctttttctccaagcatcacgccaaatcttgcataaaccgtccggatgcccatcgcttcaatatgctgtccttccttttcccacaggtgtgcagtatggctgagaaaatcctcatctgacgttgcagaatcctctgtgaaagttttctcaaggcttgtcccgtaaatacccacggcactggcttggatcaatgtcttcggcttctccttctgtttctgaataagccgctgcacttcacgcgtcgcattgatacggctggagagaatgtgctgcttcgttttttctgtccagcggccaaaaatcgattttcccgcaaggtttatccagacatcaatatgaggaagttcctgctccggggcggctccttccgtcagccattggacatatgtcatatttttttgttcagtttcccttgcgtttcttgataaaatataaacatggtgtccctggcggataagaacgcctgtcagatgctggccgagaaaaccggttccgcccgtcattgcgatattcatgaacatctctcctcatcgttctaataaatatactttacctcattgtaataaaagaaaacgcgtttcaggcctgagaagggagattaagatgccgtttattacaaaaatatcaacgcaaaaaaagaatacggaacgcttcaatatttttctggatgataaatacgccttcagcgtggacgcggatgtgctcgtgaaatttgagctcaagaagggaaaagaactcgatgatcttgacatcattgagattcaatacggcgatgaagtgaagaaaggcttcaaccgtgcgcttgactttttatcctatcgaatgcggtcgacgaaagaggtcgaggaccacttaaagaaaaaagaaacctcgccccccgtcattgcggaagtcatccataggcttaacgattacaagtacttaaacgaccaggaatttgcctcagcctatgtcagcactcacaaaaaaacaaacggaaaaggccctgatgttttgttcagagagctaagagcgaagggaattgatgccgatacaattaaggaggcgctaagttccttttcctttgaagatcagacaagagaagcggtcaagcatgttgaaaagcttctcaaaaaagataaaaagctttcgacgaaagaattcaaacagcgcgcccagctgcagcttcagcgcaagggcttctcatttgatgttatcagcgcggcgatggatcagattgaatatgaaaatgatgaagacacagagaaagaagcgctgcgccttcacgcggaaaaagcgtttagaaaataccgctatgacggctcatatgaaagcgccatgaaggtcaaacaatttttattccgcaaaggattctcactcgatttaatcgagcaattactgcaggaagaggagtactgaaatggagaaacgatacagtcaaatgacacctcacgaactcaataccgaaatcgcattactttctgaaaaagcaagaaaagccgaacagcatggaatcataaacgaactggcagtgctcgaacggaaaattacgatggcaaaagcatatttgctgaacccggaagattactcaccgggagaaacatatcgtgtggaaaacactgaggacgagtttaccatcagttatttaaatggcgttttcgcatggggatacagaacctcttcccctcagcaagaggaagcgctgccaatctcagtattgcaagaaaaagaataaagcgtaacaggaggctgattatcagcctctttttgtttgcagcacatttacacgaattcttaaagaaaaaatcattgaattcacttgaaaaatcttttaagatgaaactcgttgttttttaaaatcaaaggaggcgatgacgttgagtatcaaaaacccatctgtaaaatttattatatttgttcttatgatttgtacattttcaatcggctatacagaatacgcggtgatgggtattttgacgtcgattgccaatgactttcatatacaggtttcatccgcagggcttcttgtcacggcttatgcggctagcgtttgtttgacaggaccgctcgtcaccatcatttccgtcaagcttccgagaaagcctgtgcttcttgggctgatggcggtttttatcctttccaacctgatgagcgcactggcgccgaattttgcggtattggccatttcaagaattttatctgcgtccattcacggcgctttcttcgcgattgccatggtattcgcaagtgaaatggttccgccggaaaagcgtgctgcagctgctgcttcaatgaacggcggactgacagtggctctaatgcttggtgttccattcggctcttatctcggagatgtcctgaattggagagcggtgttttccatcattacggctcttggtgtcatcggatttttaggccttatggctgccgtgccgaacagaaaaccaaaagtgatcccaatgcttatgaatgagtggggggtttttaaacacaaacaagtgctgttttccttcgcgattaccattttaggctattccggtgtctttatcgcctacacctttatcgaacccattttgaggcattcagccggattcagcacggttggcattacaggtgctctctttgcgtatggattgggaggcgttgccgggaatttctttgctggaaaggtaccgctgcctttgctgactcggacgatgatcggcgtaatgatcggtttaatcggtgttctggctgtatttccttacatcgccatttacccggctgcagccattgtggcaacgttcctattcggggcatgcgcattcggcacgccgcctcttctgcaaacaaaggtcatttcctcatctgagggcggcacaaccattgccgcagctgtcagcgtatcagcatttaaccttgccaatgcccttggtgcatggatcggcggaatgattttaaacggaacaggctcttattcctggctgtttgcaggaggtgcgcttatgaccgcatgcggacttgtgctttctaccttcgcacacttatcagaaaagaagagcgtctacgaatatcaagtcaataaagggtaaaaaacagctgcagtgtatgcagctgttcttctttaccgtttgcctgaggctctcattctttcttgaggatgctgattgatagatccgtcagcacgctttgaagcatagtcgtcctttgctctcggttcaccctgaaatttgttttcgttttcgtaaggaaatcctttttctttatttcggaccatgtcatatccccctaggttcgagatcaaaaagttgcgtcttttcagatgaagacgtaaggttagtatatggagaacaccacgtaataaagcgttatttttttcctgaagaaaggagactgcacacatgaatatgtacattgagaaactgactaatctgcttctggaaaagaacgagatgatcagctatatacaggcaaaaacgtgggtggaattgttatggagcgatttcgaagcaacctacgcaaaagccggacacgcctatcaaggtgaaaaaatgactgaaaaaatcgtcacacaatggattgaaaactatggcggccagctccacctttttcaaagctcccgtaacgacgtgaatgattacttaaatcaaagcagaggccttttgcattaaaaacctgccgttaacgaccggcaggttttttcattttcttaaaattaccttaacaggaagaaatcataaacaaaacatgtttcaccagcctgtcaatcagggaataccacttatatcttgtcaaaatgcgaggaggagctttatatgaaaaagaaacaagtaatgctcgctttaacagctgccgcaggactgggtttgacagcacttcattccgctcccgcagcaaaagctgcgccccttcacgacatatctgtcagcatgccatcatccgatacttacatcataaaagcaggaaaactgaatgtccggactgagccaaatcatgaaggtgatattctcggcactgtatcatcagaacaaaaggtaaaagtcgataggttcgtaaatgccgattgggctcaaattcatttcaaaggaaagaaagcatatatttcaactcactttttaatgaaaaccgcaagccaagcgaaaacaacgaaacagacagccttctatgcaccgacgcccgaaaatggaaaagctaaacagctctcatctggaacagaggtgacaatacttgggtggggattcagtgaaaacggcggatttgacttcacttgggggttcgtggattatggcggagttaaaggctatattcacacaaaggatttacaaatgcgataaaaaggcaggccgaggcttgtctttttgcctatgcatgaaacatttcttctttctgcacgtaacaatgagaaaggagatgatgatatgacgggtttagtcggcggagggcttatgatcattgcgggcatactgatcaaactgtttcctcccaaatcgatcaacagtgtgtacggatacagaacgagacgctcaatgtcagatcaaagattatggaatgaagcgaaccgttacagtgcatcattaatgatcctgtcaggcttggtgattgcgggaatgggtttgctgctgggatcaaacttgtttattcttcagcttatcctgctgattgccgccagtgtcataacatttatgctaacggagaaaaggctgaaaatcatgacgcacagtcaaggaggagatagaagtggacggagttaaatgccagtttgtcaatacgaacggaatcacgctccacgttgcagccgcaggaccggaagacggcccgttaattgtcctgctccatggatttcctgagttttggtacggctggaaaaatcaaatcaaaccgcttgttgatgcgggttaccgggtcattgctcctgatcagcggggctacaatctcagtgacaaaccggaaggaattgattcgtatcggattgatacattaagagatgatatcatcgggcttattacgcaattcactgatgaaaaagcaattgtcatcgggcatgactggggaggggctgttgcatggcatttggcttccacacgcccggaatatcttgaaaaactgatcgcgatcaatattccgcacccgcacgtcatgaaaaccgtaacgccgctttatccgccgcaatggctgaaaagctcgtatatcgcatacttccagctccccgatataccggaggcatcactaaaggaaaatgattatgaaacattagacaaagcgattggattatccgaccgtcccgcgctttttacatccgaggatgtcagcaggtacaaagaagcgtggaaacagccgggcgcactgacagctatgctgaactggtacagagccctcagaaaaggaagcttggcagagaaaccctcttacgaaacagtaccttaccgaatgatctggggaatggaagaccgctttttgagcaggaagcttgcgaaagagacggaaaggcattgcccgaatggacatctcatctttgttgatgaagcttcccattggattaaccacgaaaagccagccatcgtcaatcagctgattttggaatatcttaagaaccaataagctaaaatttctctccatccgtctgtcataatggcagactttttctgtgcgtttttttcatagtctgttttaaacatgacaaaataacattaaaaatcatgaatgtcaccataaaattgtaacaaaaaacaggtttaaacgactttaaaaaaaggaatagccttactgaagatttgtgtaaaactcccctaaggcaatacttaaaaagaataataaaaagaaggtgccttaatgaagcaaggattaatctcgattattatcccgtcttacaatgaagggtataatgtcaaactcattcatgaatctttaaaaaaggaatttaaaaacatttattatgactatgaaatattcttcataaacgacggaagtgttgatgacacgcttcagcagatcaaagacttggcagcgacgtgcagccgggtaaaatatatatctttttctcgaaactttggaaaagaagccgcaattttggcgggctttgagcatgttcagggcgaggcggttattgtaatggatgccgatctgcagcatccgacatatttgctgaaggaatttatcaaaggctacgaagaagggtatgaccaagtcattgcccaaaggaacagaaaaggggacagctttgtccgctcactcttatcatctatgtattacaagttcattaataaagcggtggaagtcgatttgcgtgacggtgtcggtgacttcagattgttaagccgccaagctgtgaatgcacttttgaagctgagcgaaggaaaccgcttttcaaaaggccttttttgctggattggctttgatcagaaaattgtattttatgaaaatgtcgaacgaaaaaacggcacctccaaatggtcgttcagcagtctgtttaactacggaatggacggcgtcgtttcatttaatcataagccgctgagattatgtttttatacaggcattttcatcctgctgctttccatcatttatatcattgccacattcgttaaaattctgactaacggtatttctgtgcctgggtatttcaccattatctcagcagtgttatttctcggcggagtacagctgttaagccttggaattataggtgaatatatcggccgaatctattatgaaacaaaaaaacgcccgcattatttgatcaaagaggcgaatatcccgaacaaagacctgcctgaaacgaacgaattaaaaagcatgcggcgtctgacaaaaatgcactgaaaataccaagcgccattggcagtgctttttttgcgtgtctattatcttaaaagcaagactggagaatttatatgaaaagaaaacatatcatgatctatgcggccagtttgctggtgtccgttctggcacacgctttttttgtgaaagaatgggcggaaggcaggtatatgacaggtccgggtgacgggcttgcgcaaatgatcgtatttaaaaaattattatttgaccaatatacacacgggaattttttctacaattattcattcggacttggcggcggcacattcagtcagctcggctattatttttccgcgtcttttctttttcttgctgtgtccgccgctgtttggctgcttcaagccgtccagctgatcggagaagcggatacgcttttttgggcagagtcagctgttttcatcagtatttttaaattgagcttgatcatctttacgtccgcttctgtttttcattatcttcttaagcacagggcggcatcgttcacgggagccgtgttatacggcgtctcaattatttatttccgtcacgaagcgtattgggaatttttcaccgatacaatggtttggcttccgctgcttgtgcttggtgcagaaaaaattattagagagcggcgtccggcgtggtttatcgttgcgtgttcgctgacgttaatcaacaatttttactttgcatacataaaccttatattcatcggaatctatgtgctgttcagatggctgatccgtttggaaccacatgaagagaaaagatggattcaaatcagattatttctcgtttcaggcttcatttcttttggcatcagtgcggcggcgtttgtgccggtagtatacggttttttaaacaacctgcgccctccatacagccagaaaatagagtggctcaatttcgatgataatatcttattttcgagccggatcatcattgtgccggccgcttttctgctgtttttgtttattatttctttttacaaaaaccgtgtgtttcgtctctttgccgggttgagcctgctgtttattctgtttcatttcagtccgtatgcggcaagcgtctttaacggtttttccgccccgcaaaaccggtttgaatatgttctggcctttaccattgcgggagcagctgcggctggtttgtcacagctgtctgaattgaaacggaaagaactgctcccggccgcagctgtcgtcctgcttctttacttgtatcatattcaaaggtataagctcgatatatggaagcctgcgaatgaaagtattctattgctcttactcatgacaatcgcagccttgtttgctgcagcttttgcgaaaaaacgggcaaaaatggctgtgtacggtataatcattctttcttcgctgtttgtcgccaactcctatcaaaaatacgcgctctcagaaggcggcgatttggatagtgtgacaaaagaatatcttacaagtgaggaatacagagggcgggaatcatctgagctcatcagacgtttacagaaggaagacgatgatccgctcatgagaatcgactggatgaacggggtccgcaataatacgccaatcatttacggatttaatggcttcagcgcgtattccagcattttaaacaaagatctgctggccttctattggaatgatttaagcatcgatatgggcagggaaagcgtcagccgttacgcgtcattgggagacagggcgaatttatacagcctgctttacggcaaatattatatgaccgaaaaaacaaacgaagccagcgtcccgtacggattcaaaaagcatttagaaacagagcattatgcagtttatgagaatcagtacatgcttccattcgtcaaaacagcggatgccatatacagcgaaagtgagctggaccgattgcccgctcttgcgaaagaacaggcgatgctgaaaggaattatattaaaagatccatcaggaaaaacggagcagacaccaaaaccgtccaatttgatcaccaagtcggacatcaccgcaaaacaagcccagtatcaaaacgggctgctaaccgtaactggagaaaacggaggagagctgatcatcaccccgaaacagccatcatccgctgcgggagactactatgtcagcttttatttgaaaagcaaagcaaaagacaaaggatttacgttaaaggtaaatgattatgtcacaacaaggaaatcgaacaaatcgatctataaaaccggagtaaataatataacggtaagagtgcctaaatcaggccatatctcaatcaatcttccgaaaggaacctatgagctgagaaacatagcgctctatgaagaaaattaccaaacgctgaaaaacgctgtaatgcaaaataaaacagagaaagcagacaaactgaattggaacaaaaatcgactgacctttgcctatcatctgtcaaaagaccagtacatcatgcttccgatcccatatgaaaaaggctgggagctgaagatcaacggaaaaacacagaagatcgaaaaagcggattatgcttttataggcttcaaggcgcaaaagggagacaatcacattgagctgacttactatccgccatacttcaaaatatcggcggtcatatctctcgtcagtctgctgtttgctgttttctatataagacgtaaaaagcccggctctatatagagccgagctttaattttttctgaagtttttcttcgctgaatatccatcccgtataggacgaacgaatcgtgagatcatggccgatgtgaacaattgcgacaaacggataatggcctttgctccgataacgcaggtcgataaatctcacctcataatgatctttaaacgtatccacttcccaccggtataccggagaaaaggacagaaacgccgcaatgttatcatcctgctttgccgcatgcattacatcggtttcaggaacaggcacccgattaaatgtatccagaatcacgacatgtccttccatgcttcttcctacatagaaagcatgtgctgtcgtcactgcgattcgccattgcctgaatttcatcgttggagaaataataatgctttcgatctcatcatgaatcatctcatgaagcttccgtttaattctcagctgcatgatcaggcgcaccaagtagtagcctaccaatatgatatataagctgagaaacgtgatgccgggactcccgcctgcataccaaatcgcgatagctgctagatggctgataaaaataaacggatcaaacgtattaatcagcccgagcgcaacccattttttcgaaaatggacgaatggcttgtgttccataggcgttgaatatatcaacaaagacatgcagaacgactgccagcagtgtccacagccacaggtgcagaaaatcggcctgaggataaaataaatacagaatcgccgggatgatgacagaccaaaacaaaacggcgggaattgaatgggtaaatcctctgtgattccttatataaacagcattgtttttaagctttaacacagtatcaatatccggagcctgagagcccgcaagcgttgcgatcataacagcgtgagccattgccggatctgatccgacaacaggatcaagcgtcgcaataccgcccagtgcgatgcccataacgacatgtgtgcccgtatccataggtgacctccttgcaggatgatcctgcacattcactttgtaagaaattccccattttcatatacccaatttttaaactgattcaatcgttctcatatgtttccgctttttctttattactatttaatgtaacatattatcgtactgtgcccttagtgtacaacaaaaaacagtctaaagaaaagcggggcgcgaaagactggggagaaacacatatgaacgtacttgaagacaaattaaaacaaaaagacatacagcaatttcgcgatgatttaatctcatggtttgaacgagagcagcgcgttctgccgtggagagaggaccaagatccatataaggtgtgggtatctgaagtgatgctgcagcaaacgagagtagagacagtgattccttactttctccggtttgtggaacaattcccgacagtggaagcgctcgctgatgctgatgaagaaaaggtgctgaaagcatgggaagggctcggctattattcgcgagtcagaaacctgcaaagcgcggtaaaagaagtgaaacaggaatacggcggcattgtccctccagacgagaaagattttggcgggttaaaaggcgtcggcccttatacaaagggagcggtgctcagcattgcctacaataaacccattcccgcggttgatggaaatgtgatgcgtgtcatgtccagaattctttctatttgggatgatattgccaaaccaaaaacaagaacgatctttgaagacgccatacgagcttttatttccaaagaaaaaccatctgaatttaatcagggcttgatggagcttggagccttgatctgtacgccaaaatcaccctcatgcctgctatgcccggttcagcagcattgctcagcatttgaagaaggcactgaacgggagcttccggtaaaaagcaaaaagaaaaagcccgggatcaaaaccatggccgcgatcgtactgactgatgaagacggacaagtgtatatccacaaacggccgtctaaaggtttgctcgccaacctgtgggaattcccgaatcttgaaacacaaaaagggatcaaaactgagcgtgaacagctcattgctttcttagaaaacgaatatggcatacaagctgatatcagtgatctgcaaggtgtagtcgagcatgttttcacccacctggtatggaatatttcagtgtttttcggtaaagtaaaacaagtgtcggataccagcgagctgaaaaaagtatcgaaagaagagctcgaacaatttgctttcccggtgtcacatcaaaaaatctggaagatggcagtagaagcagccgccatctcggctgctccgtaaaccattcttaatcgtaagagacgcgcgtgccgtggctgtagtccgcttcattgcgcttcattccgccgcgcgcttcaatttcttgcgttaattcccggtattttgattggccttcttcgttcaaataaggcataatttgctgaaaggcatgatgaaaataagcgagttcactgttcttccaatcttttttggaaaccatgttcaattcgctcatatcacgtccgacatacataacagaagaccccctttaaagttcttgccattattgtttgtggaaataaaagaactatacgctacaaggagatgaggaaaaatggaacaaaataaatgtgcactcgtaacaggaagcagccgcggtgtcggaaaagcggccgcgatcagacttgctgagaacggctataacatcgtcattaactatgcacgcagcaaaaaagcagcattagaaacagcggaagaaatcgaaaagcttggcgttaaagtgcttgtcgtaaaagcaaacgtaggacagcctgcaaaaatcaaagaaatgtttcagcaaattgatgaaacgttcggcagacttgatgtttttgtcaataatgccgcttcaggagtactaagacctgtcatggaattagaagaaacacactgggactggacgatgaacattaatgcgaaagcattgcttttctgcgctcaggaagctgccaagctaatggagaagaacggtggcgggcatattgtcagcattagttcattaggctctatccgctatcttgaaaactacaccacggtcggtgtatcaaaagcagcgttagaggctttaacccgttatcttgccgttgagctttcaccaaaacaaattatcgtcaatgctgtttcaggcggagcgatcgacacagatgcgctgaagcacttcccgaatagagaagatctgcttgaggatgcgcgccaaaacacgccggcgggacgcatggtcgaaattaaagacatggttgatactgtggagtttctagtgtcttccaaggctgacatgatccgcggacagacaattatcgttgacggcggacgctcactgctcgtttaaaaatttttaaaaaagaggaatagctatacgatcacctgcacattctaatgaccgtggaggtgataacaatggctaactcaaataacttcagcaaaacaaacgctcaacaagttagaaaacaaaaccaacaatcagctgctggtcaaggtcaatttggcactgaatttgctagcgaaacaaacgctcagcaagtcagaaaacaaaaccagcaatcagctggacaacaaggtcaattcggcactgaattcgctagtgaaactgacgcacagcaggtaagacagcaaaaccaatctgctgaacaaaacaaacaacaaaacagctaatcactgaaacagaaaaaagcacttcatcttcgggtggaagtgcttttttctgtttgaaaaacgacaaaacttgtggaaggtctacagaatgagtcaaagggtttgctttatggagatcgaaatgattaaaggaggaaatgtttatactttcatcaggctgaaggaggaaccgatgaccgaatttgaaaagctggtaagtgaacagatgaaaacgatggataagcttctcgatctccaatcagagctcgaccgctgcaaacaaattgaggcggaactccggcatttggaaagggatgcaaggctgcgtgggattcaggctgaaattgcggtaaaacggaaacaccttgccgatatacaggatatgtttcaaaagcagacagagcaggtcattcgttcatatcgcagctcagaaaagccgtcttcctttgtgtagtgcaggaatgtgccattccccggccggaatggctcttttattttcatttttcaatttgtaacgttataataggtaaaagacgttgtcggtaagcaaatttggacatactaactgtagggctttatagaaagtaggggagaaatatgggctatcccaaggaaggagaaaccattcaaattcacagctataagcacaacgggctgattcatagaatttggaatgagacaacaatcttaaaaagtacagaaatgtgtgtcatcggagccaatgaccggacgatggtaaccgaatcagacggccggacatggataaccagagagcccgcaatctgttattttcacgcaagacaatggtttaatgtcatcgggatgctgagggaagacggggttcattattattgcaacatcagttctccgtttgcctatgatggcgaagcaattaaatatattgattatgacttagatgttaaggtttttcctgacatgacctacaatattctcgatgaagacgaatatgatgatcatcggaaagccatgaattatccaaaagaaatcgacagtattttaagagactacttaaatacgctgctccattggattcaccagcgtcagggaccgtttgcgcccgagtttgtcgatatgtggtatgaacggtatttgcgctatacaaaataatggttacgtaaaaacctgttgcggggtacaacaggtttttcacatgggctcacacacatcatgataaagagagagggggaatcaacgtgggggttatgaaacgctacatgcaattcgtcaaaccttataagaagcaaattttcgttacagtattaatcgggatcgtaaaattctccattccgcttgctctcccattgcttctgaagtacgtagttgacgacattattcaaggaggcggcacggccagtgacaaaaccacgtcattgttcacgattatggcgatcatgttcgccttatttttaattttgcgcccgcctgttgaatattaccggcaatattttgcccagtggactgccagcaaggtgctttatgatataagagctaagctgtttgaccatatacaaaaactgagccttcgtttttacgcgaatacaagaacaggggaagtcatttcccgagtgattaatgatgtagaacaaacaaaggatttcgtcatcacagggctgatgaatatatggctcgatatgctgacgattttgattgtaatctctatcatgctcacactggacgttaaattaacgctgatttctatcgtattattcccattatacggaatatcagtgaagtatttttacggccgtttacgaaagctgacaagggagcgctcacaggctcttgctcaagtgcaggggcatttgcacgaacgcattcaaggcatgcctgtcatcagaagctttgcgatagaagatcatgaacaggctcaatttaatgagaaaaacggtcatttcttagataaagccatccgccacacgaattggaacgccaaaacctttgcggtcgttaataccattacagatttggcgccgctcatcgtcatagcgtgcgccgggtattttgtcattaatggaccgctgacagtcggaacaatggtcgcgtttgtcggatatattgacagaatgtacaaccctgttagaaggctgatcaattcctctacaactttgacacagtcaatcgcatcaatggacagggtgtttgaatttattgacgagccctatgaactcactgacaaaccaaatgcgataaaggccgatcagattcgcggaggagtggagtttcaaaacgtttcgtttcaatatgagaaggacaaagaaaatattcttcatgatgtatccttaaaagtaaatagaggagaaactgtagctctcgtcggcatgagcggaggaggaaaatcaacgctcgtcagcctgatcccaagattttatgatgtaacaagcggcagactgctgattgatgggacggatattcgcgattatgaagcaagaagccttcgcaaccaggttggtatggtgcttcaggatacctttttatttagtgaaacgattcgggaaaatatcgcgatcggcaagcctgatgccacacttgaagagataatcgaagccgccaaagctgcaaatgcccatgaatttatcatgagttttccagaaggatatgagacccgggtgggagaacgaggcgttaagctttcaggcggacaaaagcagcggatctcaattgcgcgggtattcctgaaaaatccgccgctcctcattttagatgaagctacatcagctctggatttggaaagtgagcattacattcaagaagcgatggacaaactggcgaaggatagaacaacttttgttgtcgcccaccgtttatcgacaatcacccatgcggataagattgttgtcatggaaaacggcacaatcattgaaatcggaacccatgatgaactcatggactatgagagccagtacaagcatttatttaccattcaaaatttgaactaaaacatcaatcttatatccttttaacgaaggatataagatttttttgtgtataaaaaaacccggctgtttaaccgggttactcttctgtttctatttcgcagtctttcggatgatacgtttgaaaacttgtgataagtgtttctaaatgttcaagctgctcgcgatattccacggcgcttgccataatattgagcatgttgtaatcaataagctcctcatccgtattctgctgattttttaaaaatgactttgttaaaagctgcttataccggatgccttcttcaaccgcgtcatcatgcggcttgatttttccgacaaacctcatcaaaatccgttcgtgccagtaaagcaggtaatcaagttcttcagtcaatgtttcctgaaactcttccggcatatgatagatctcgttttccagacgatgcagcttcttcaatgtatcaagcgcccgatttgcagtaataatggcctgtctgaacaggacaagctttcttgatttcacataagtcgttttcttaaagtaacttctttcttctttatatagaagatatgtctgatcaagcttgatcattttttctttcagtttttcaatatcctctttcaaaatcgaatgctctgtcgactgccgcatggacaatctgatccacttcataatttcttcggtgttttcgacggtattatgaatcagctttgtttcgtacttaggaggcaaaaacacaaggttgacgataaaggaagaaagcacccctaagatgactgtgcttgttctgatcagcgcgaacattaaaaagtcgtcaccggcagattctaatatcgcaatgactgttacaagagcaattgaaattgtatgttcaattttaagtttcagcatgattgtaatgacaataactgctgttaacccgatcataatcgggctgggtccgaaaataaggccgaacactgtggcaatcacagctccgatgatatttgcttgaacctggtcaataataatgagaaaagagcggtaaatcgacggctggatcgcaaatatcgctgcaattccagcgaaaatcggcgcgggaagcccgatccacgaagccaaataaagggcaagtgtaatcgcaatcccggttttgaaaatgcgggcaccaagtttcattggtttgtgcgtgcattcctttctatagtaaattgtgtgacatagcaaatgggctaatccttaaaattcccggttagtttatttgctaaacaattaagtaatatacagggatcgatacaaatattcaagctatttttctagaaaaagaccaaaatcttacacgttgtttgattccataaaaaaaacaggagctcaaagctcctgttcaaggtatctgattctagtttttaagatgtttaaaagcatcctcgaccgctgcaagcgtgtctttaatatcctgctctgtatgtgctgtggtaataaaccaagcttcatacttagaaggtgctaaattaattccgcgttccagcatcagcttgaaaaacgtagcgaatgtttctccgtcactccgttcagcctgctcgtaattttcgactttctcatcagagaagtataccgtgagcgcaccttttaaccggttgaccgtaatggtgatgccgtgtgtttctgcgtgcttcaaaataccttcctcaagcatagcgccaaggtgatcaagcttttcatacacgcctttttctttgagcacttccagacaagcgatgcctgataggatggaagcggggttccctgccattgttcctgcctgataagcaggtcctagcggagctacctgctccatgatttcttgtttgccgccataggcgccaatcggaagtccgccgccgataattttcccgagtgctgttaaatctggtttcacctgtaagagatcctgcgcgccgccatacataaagcggaaagccgtaatgacttcatcgtaaataacgagagcgcctgcattatgtgtcaattcatttactttttctaagaagccctctttcggctccacgataccgaagttgccgacaatcggttcaacgagaaccgccgcgatttcactgccccatttatcaagagccgctttatagctatcgatatcattaaatggtactgtgatcacttcgtttgcaatgcttttcggtacaccggctgagtctggtgtgccaagagtagacgggccggagcctgcggcgacaagcacaaggtccgaatgcccgtgataacagcccgcaaatttaatgatttttgtccggcttgtatatgcgcgagccacgcggatggtcgtcataacggcttctgtacccgaattgacgaatcttactttgtccatagcgggaatggcttctttgagcatttttgcaaatgtaacctcgtgtttcgttggtgttccatacaatacaccgttctctgccgcttttttaatcgcttctgtaatatgcgggtgggcatgtcctgtaataatcggaccatacgccgctaaataatcgatgtatttgttgccgtccacatcccaaaaataagcgccgcttgctttctccattgcaacaggagaaccgccgccgactgctttatatgatctagacgggctgtttacaccgccgacaatgtgctgtaatgcctcattgtgaagttcaattgattttgtatgcaagaataaaaacctcctatatctccatgcgtcctttctattgtagcatgcttccgaacaagaacaatggcttcgggcttcagattcagctgagatggttgtaatctggacaagaattggatacgcttaataaaaaacatccggaggtaacgtaatgactatagaaatcggacataaagcgcctgatcttgagttaaaaggtgatcatggggaaacagtaaaattatcggattataaaggaaagtacatcgtgctttatttttatccaaaggacatgacaccggggtgtacaactgaagcatgcgattttcgggacagtcacgaaagcttcgctgaactggatgccgtcattatcggcgtcagcccggacagccaggaaaaacacggaaaatttaaagagaagcataaccttccatttctgcttcttgttgatgacgagcataagctggcggaagcatttgatgtgtggaagctgaagaaaaatttcggaaaagagtatatgggaatcgagcgttccacttttttaattgataaagaaggccggctcattaaagaatggagaaaagtaaaagtaaaggaccatgtagccgaagcgcttcaaaccctcaaagatatgtcggaaaagtaaatctctatgagcctatgcttacttttaccctgatatcaattgacaaattatcgtagaaagagttacactaattataaacattacaatgtaagaattttttttagaagagaggtgcatgacggatggctgcacatgaactaaaagaagccttagaaacgttgaaggaaaccggagttcgcattactcctcaacgtcatgcgattctggaatatctcgttaactctatggctcatccaacagcggacgatatatataaagctctggaagggaaatttcctaacatgagcgtagcgacggtatataacaatttgcgtgtgttccgggaatcaggtttggtaaaagagctcacatacggtgatgcttccagcagattcgattttgtcacatccgatcactatcacgcgatttgcgaaaactgcggtaaaattgtggacttccactacccgggccttgatgaagtggagcagctcgctgcccacgtcacgggcttcaaggtaagccaccaccgtttagaaatttacggcgtctgccaagagtgttcgaaaaaagaaaatcattaaaaataagctgaccgcacgaaacggtcagcttattttatttcgacattttctttttattataagactcatcaaattcttttccttctaatcccttatctaaagtcagcggctctcggcaatgcatgcacatatcgactcttcctaaaacctttgtctctttatcacagcctggacaaatgacgcgaaccgctttagtcgaaagcattccgatccaaaagtaaactaccgtgctgagaccgatggataaaagcccaagtatcataaacaaactagaaagcaaaactgactctttgaaaaagatcccgatgtacataatgataaacccaacgaaaaccaaacttaacgcaaatgttctgattttattaattttgctggagtatttcgccatgtccatccccctctgttttaactatagcacaaacccgatgggattttcttcatgttttcggttgaactggaatttacatatggagagttactgtgaaattgtttataatagttcaatgtgtttagaaaaaaggaatttcgttttaaccatagaattgaatcaaatagagaataaaaaaatttgaacaattgcattggaggaatagtgatggaaaatcttctccgtccaatttaccaagaaagagcaagtcaccccaatacattggctgtcattatgattgagagaagaaacaaaacatcttccttaacagataactttgatgcagctttgctggtgattgtaaaggatgctgatgagccagtttttataaagcattatgaatttgatcatcaaacagcttctttgcatgtggtaacagattctcagattcaagaatggattttgcttggaacaaatagaagaatcatagattggattgtaaatggcagagtcttgtttgaccgtaatgaatacgtagttgaactgattgacaggctgaatacatttccgtttgccgaacgtaaactgaagatcggactcgaatacggcaaattaatcagaaggtatgttgaagggaaagctttttttgaagccaatcaatttttagatgcctacaatgccgttgttcatgcgctgcatcatttagcacgtattgaagtaatcgacagaggattccatcccgaaaccacggtgtggagccaagtgcgccagatggagccccaagtgtacaaattatattccgagctgattgaaagtcatgagagcctggaaaaaagacttgaattattattcttagcaaatgattttctcatccattccaaagccgagatcggttcggcgcatcttttcgaagtaatgaaagaaaaagacatttggcaattcggtgagcttcttcaacatcatgacctaaagcactttacccaagatcttggcgttatgcttgattacttgacagaaaagggacttatcaacgtctgccagatagaaacgaaaggacaggctgtctatcaccgaggatattcttttaaaaaagatgttgactctgattcttgaccgtgttatattattaaacgtcgctgatgcgcttctgagaaaacaagctcacagcggcgggaaaataaatcaaaaaaacatttgacaaaagaaagtcaaaatgttatattaataaagtcgcttcaacaagaagtgaaaatgatctttgaaaactaaacaagacaaaacgtacctgttaattcagtttttaaaaatcgcacagcgatgtgcgtagtcagtcaaactagggtctgcacgacgcaggtcacacaggtgtcgccgcagaaagcggtgaacttaacctgtgatccatttatcggagagtttgatcctggctcaggacgaacgctggcggcgtgcctaatacatgcaagtcgagcggacagatgggagcttgctccctgatgttagcggcggacgggtgagtaacacgtgggtaacctgcctgtaagactgggataactccgggaaaccggggctaataccggatggttgtttgaaccgcatggttcaaacataaaaggtggcttcggctaccacttacagatggacccgcggcgcattagctagttggtgaggtaacggctcaccaaggcaacgatgcgtagccgacctgagagggtgatcggccacactgggactgagacacggcccagactcctacgggaggcagcagtagggaatcttccgcaatggacgaaagtctgacggagcaacgccgcgtgagtgatgaaggttttcggatcgtaaagctctgttgttagggaagaacaagtaccgttcgaatagggcggtaccttgacggtacctaaccagaaagccacggctaactacgtgccagcagccgcggtaatacgtaggtggcaagcgttgtccggaattattgggcgtaaagggctcgcaggcggtttcttaagtctgatgtgaaagcccccggctcaaccggggagggtcattggaaactggggaacttgagtgcagaagaggagagtggaattccacgtgtagcggtgaaatgcgtagagatgtggaggaacaccagtggcgaaggcgactctctggtctgtaactgacgctgaggagcgaaagcgtggggagcgaacaggattagataccctggtagtccacgccgtaaacgatgagtgctaagtgttagggggtttccgccccttagtgctgcagctaacgcattaagcactccgcctggggagtacggtcgcaagactgaaactcaaaggaattgacgggggcccgcacaagcggtggagcatgtggtttaattcgaagcaacgcgaagaaccttaccaggtcttgacatcctctgacaatcctagagataggacgtccccttcgggggcagagtgacaggtggtgcatggttgtcgtcagctcgtgtcgtgagatgttgggttaagtcccgcaacgagcgcaacccttgatcttagttgccagcattcagttgggcactctaaggtgactgccggtgacaaaccggaggaaggtggggatgacgtcaaatcatcatgccccttatgacctgggctacacacgtgctacaatggacagaacaaagggcagcgaaaccgcgaggttaagccaatcccacaaatctgttctcagttcggatcgcagtctgcaactcgactgcgtgaagctggaatcgctagtaatcgcggatcagcatgccgcggtgaatacgttcccgggccttgtacacaccgcccgtcacaccacgagagtttgtaacacccgaagtcggtgaggtaaccttttaggagccagccgccgaaggtgggacagatgattggggtgaagtcgtaacaaggtagccgtatcggaaggtgcggctggatcacctcctttctaaggatattatacggaatataagaccttgggtcttataaacagaacgttccctgtcttgtttagttttgaaggatcattccttcgaaatgtgttctttgaaaactagataacagtagacatcacattcaattagtaacacaagatatcacatagtgattctttttaacggttaagttagaaagggcgcacggtggatgccttggcactaggagccgatgaaggacgggacgaacaccgatatgcttcggggagctgtaagcaagctttgatccggagatttccgaatggggaaacccaccactcgtaatggagtggtatccatatctgaattcataggatatgagaaggcagacccggggaactgaaacatctaagtacccggaggaagagaaagcaaatgcgattccctgagtagcggcgagcgaaacgggattagcccaaaccaagaggcttgcctcttggggttgtaggacactctatacggagttacaaaagaacgaggtagatgaagaggtctggaaaggcccgccataggaggtaacagccctgtagtcaaaacttcgttctctcctgagtggatcctgagtacggcggaacacgtgaaattccgtcggaatccgggaggaccatctcccaaggctaaatactccctagtgaccgatagtgaaccagtaccgtgagggaaaggtgaaaagcaccccggaaggggagtgaaagagatcctgaaaccgtgtgcctacaagtagtcagagcccgttaacgggtgatggcgtgccttttgtagaatgaaccggcgagttacgatcccgtgcaaggttaagcagaagatgcggagccgcagcgaaagcgagtctgaatagggcgcatgagtacgtggtcgtagacccgaaaccaggtgatctacccatgtccagggtgaagttcaggtaacactgaatggaggcccgaacccacgcacgttgaaaagtgcggggatgaggtgtgggtaggggtgaaatgccaatcgaacctggagatagctggttctctccgaaatagctttagggctagcctcaaggtaagagtcttggaggtagagcactgattggactaggggcccctaccgggttaccgaattcagtcaaactccgaatgccaatgacttatccttgggagtcagactgcgagtgataagatccgtagtcgaaagggaaacagcccagaccgccagctaaggtcccaaagtatacgttaagtggaaaaggatgtggagttgcttagacaaccaggatgttggcttagaagcagccaccatttaaagagtgcgtaatagctcactggtcgagtgactctgcgccgaaaatgtaccggggctaaacgtatcaccgaagctgcggactgttcttcgaacagtggtaggagagcgttctaagggctgtgaagccagaccggaaggactggtggagcgcttagaagtgagaatgccggtatgagtagcgaaagaggggtgagaatcccctccaccgaatgcctaaggtttcctgaggaaggctcgtccgctcagggttagtcgggacctaagccgaggccgaaaggcgtaggcgatggacaacaggttgatattcctgtaccacctcctcaccatttgagcaatgggggacgcaggaggatagggtaagcgcggtattggatatccgcgtccaagcagttaggctgggaaataggcaaatccgtttcccataaggctgagctgtgatggcgagcgaaatatagtagcgaagttcctgattccacactgccaagaaaagcctctagcgaggtgagaggtgcccgtaccgcaaaccgacacaggtaggcgaggagagaatcctaaggtgatcgagagaactctcgttaaggaactcggcaaaatgaccccgtaacttcgggagaaggggtgctctgttagggtgcaagcccgagagagccgcagtgaataggcccaggcgactgtttagcaaaaacacaggtctctgcgaagccgtaaggcgaagtataggggctgacgcctgcccggtgctggaaggttaagaggagcgcttagcgtaagcgaaggtgcgaattgaagccccagtaaacggcggccgtaactataacggtcctaaggtagcgaaattccttgtcgggtaagttccgacccgcacgaaaggcgcaacgatctgggcactgtctcaacgagagactcggtgaaattatagtacctgtgaagatgcaggttacccgcgacaggacggaaagaccccgtggagctttactgcagcctgatattgaatgttggtacagcttgtacaggataggtaggagccttggaaaccggagcgccagcttcggtggaggcatcggtgggatactaccctggctgtattgaccttctaacccgccgcccttatcgggcggggagacagtgtcaggtgggcagtttgactggggcggtcgcctcctaaaaggtaacggaggcgcccaaaggttccctcagaatggttggaaatcattcgcagagtgtaaaggcacaagggagcttgactgcgagacctacaagtcgagcagggacgaaagtcgggcttagtgatccggtggttccgcatggaagggccatcgctcaacggataaaagctaccccggggataacaggcttatctccccaagagtccacatcgacggggaggtttggcacctcgatgtcggctcatcgcatcctggggctgtagtcggtcccaagggttgggctgttcgcccattaaagcggtacgcgagctgggttcagaacgtcgtgagacagttcggtccctatccgtcgcgggcgcaggaaatttgagaggagctgtccttagtacgagaggaccgggatggacgcaccgctggtgtaccagttgttctgccaagggcatcgctgggtagctatgtgcggacgggataagtgctgaaagcatctaagcatgaagcccccctcaagatgagatttcccattccgcaaggaagtaagatccctgaaagatgatcaggttgataggtctgaggtggaagtgtggcgacacatggagctgacagatactaatcgatcgaggacttaaccacattttgaatgatgtcacacctgttatctagttttgagagaataagtttttcaaaaaaacacttgattttctcaagaatacatagtataatgttaaatgtcactgaaattgtctggtgatgatggcgaagaggtcacacccgttcccatgccgaacacggaagttaagctcttcagcgccgatggtagtcgggggttccccctgtgagagtaggacatcgccaggcagacttcattccgcagtagctcagtggtagagctatcggctgttaaccgatcggtcgtaggttcgaatcctacctgcggagccattattggagagctgtccgagtggtcgaaggagcacgattggaaatcgtgtaggcggtcaactccgtctcaagggttcgaatcccttgctctccgccactgatacttatacataattacaattgaaagtctgggcccgttggtcaagcggttaagacaccgccctttcacggcggtaacacgggttcgaatcccgtacgggtcattatatgatggaggattagctcagctgggagagcatctgccttacaagcagagggtcggcggttcgagcccgtcatcctccaccattatatcatcgcggggtggagcagttcggtagctcgtcgggctcataacccgaaggtcgcaggttcaaatcctgcccccgcaaccaaattttaaaatggtccggtagttcagttggttagaatgcctgcctgtcacgcaggaggtcgcgggttcgagtcccgtccggaccgccatttaaatacttaggctcggtagctcagttggtagagcaacggactgaaaatccgtgtgtcggcggttcgattccgtcccgagccaccacctatgccggtgtagctcaattggtagagcaactgacttgtaatcagtaggttgggggttcaagtcctcttgccggcactgttttttcaaaatttaatgtggaggggtagcgaagtggctaaacgcggcggactgtaaatccgctccctcagggttcggcagttcgaatctgcccccctccaccatttataggggcatagtttaacggtagaacagaggtctccaaaacctccggtgtgggttcgattcctactgcccctgccaaatttatgacatcttgagattatggcggttgtggcgaagtggttaacgcaccagattgtggctctggcactcgtgggttcgattcccatcaatcgccccatattatcattgggctatagccaagcggtaaggcaacggactttgactccgtcatgcgttggttcgaatccagctagcccagtctcactttttatatcaactgcatataatgtattaagtccattaaaaatgcggaagtagttcagtggtagaacaccaccttgccaaggtgggggtcgcgggttcgaatcccgtcttccgctccaattacggcggcatagccaagtggtaaggcagaggtctgcaaaacctttatccccggttcgaatccgggtgtcgccttcttattgccggggtggtggaattggcagacacacaggacttaaaatcctgcggtaggtgactaccgtgccggttcaagtccggccctcggcaccaattttacttacatggtaagttgaattggtgtttgtgttttatcattataactaatcatattaatgatctacttatgtagatcatttttttaatgctttgatttatcataacaagttaagttccgaggcctattataaagcggctgtatagctagtctttcaacacttttattttatatttccataaaaacttttttgaaatacgttgacactttatgagattcatgatatatttatattcgtcggttagatacgacgtaaaacttgccggtgtggcggaattggcagacgcgcacgactcaaaatcgtgttccttctggagtgtcggttcgaccccgaccaccggtatactgaaaaacccgtttcttaacagaaacgggtttttattttttattaaagaaaaggagccgaggctcctttttatacttactcagcgtattggtctaggatctcttctagcacctcttctagctcttctgtatcttcaagctctgattggctgaaacggacgcgtacaagctgttctccgtcattatacatctcttccagccaccctcggagtcctcttgctctgcggtcgacttcgaaaatgatttccaaaccgtcttcgtctaaaaggaaaatgagctctaattcatcaagcatctgacgataatatccggaagtcggaacgaattcgaattcttgaacaaacggaagacgacgctggaagtatggcgcttgttcgcagtctgcttcgttaagacggaagcccaggttttcgattgcttcaagcacattttcaatccaagggtgcgcttcaacgaaaatacggtcatgatcggatttatcgataccgccttgaatgtcaaggtctgtcaccacggcaacctctactttccctacagtgatcggcgtatctagaggcagagtgaatgtgaacggaaattgatgctcttcaccaggctgtatggtaaatgaaccagtgacccggaaagaatgaattgtagcgtatttccggtgctcttcatcgtcttttacaatgacataccgtgtgctaagctgtaaatcgatataacggatgtcctgagcgatttttccgcctttgacatgtaccgttccctgtacttcttctcctggaaaatatgcgtctttttctaaaattgtatctacttttgcagctccaattccggcacttgccgcaagcttcttaaaaaatgacatgttagatcttcccctttttcttttttctcaacagatatacgtaagaaggaggaaaaaagattcgtttgattcatacttttttcctattattcgtctcggcctagggacagactaagaataatattgaaaataaaggagtggatggaagtgaataaagaaagtttggttgcagatgaattacacagaatgtttttggccggtgagctgcaaatcacagtagaggaggatataaacagtatttccgaaaggctgagaaacggtgatctcagtttagaccgattaagcggtgaagacgcgtttataaaagaaacggtaaacgaggctttaagaagagtggagcaataaaaaagagacggcatctcatctttgagatcccgtctctttttgtggtctttactgcaagataaaagcgtaattgctcacccgagccaccccttttctaacagaagatctgacagttcatcatggagataaacagttgtatctaattgatcatgcaatgctcttctgatgtggggattttcggcttctgttattgcgacagtgtatttgttaatgctggtttttattgttgttaacaaatcaagaatatctttgggacaaagactttgttcaatgggaaaccacctcctttgttttttagcagctcctgataagaaagtatttggctttgtttcttgcttctatacaaaatgctataataagcaacaaattttgttggggggtgtgatgatgaagcagattattgcgatgggaggcgggggtttttcgatggagccggataatttgtccctcgatcaatatatcctcaatcaatcaaaacgagagcagcctcgtatttgttttttgccgacggcgagcggagattcccaaaactatattcagcggttttatcatgcatttcaaacattggattgcgtgccgtctcatttatctttgtttaagccgccatcatcagatttagcttcttttgttatggaaatggacgtgatttatgttggcgggggaaatacgcggaatttacttgtgttatggaaagagtgggggctggaccatattctcagggaagcatggaagaacggtgtggttgtagctggaataagtgccggtgcgatctgctggtttgaagaaggggtgacagatcagccggaccgctgacaagtttgaaaagtttaggttttttgcaagggagcttttgtccccattatgacggggaaaaggatcggagaccggcgctgatatctaacaagttcttatgcagtggctatgcagcggatgatggggctgctctccatttcataaatgatcagctgtttcagactgtgagttcaaggtcgggtgcaaaggcatatcgggtgatgatggctgaacatgaaatagctgaaatcccgttgccggtcaaatatttagggtgaaattggctgaatattatctatattcctctttttttcagattgattttatgataagatgagtgcgaaatcaatagttactgggggtgcccgctttcgggctgagagagaaggtaagcttcttaaccctttggacctgatctggttcgtaccagcgtggggaagtagaggaattgtttttgttattgtcttgctgggcaataatatgtttctttctgactgtaaccgggttcatttatatgaatccggttttttgtgctggttatgggcttgattttgtcctttcaaacgtagagaggggaaggaaaagtaatgcaaaacaattcagtgcagcaagccaacatttccattatgtcaagtttttcaggcagcaagaaggtatacgtggagggttcttcttcggacatccaagtgccgatgagggagattgcattgagtccgacgacgggatcgttcggcgaagaggaaaacgcgcctgtgcgtgtctatgatacaagcggaccgtatacggatcctgaagtaaccattaatattcaagaaggattaaagccgctccgccaaaaatggattacacagcgcggtgacgtggaagagtatgaaggtcgggctataaaaccagaagataacggttataaaaaagcaaatccaaacgtaagctacccaggattaaagcggaaaccgctgagggcgaaggcaggtcaaaatgtcacacaaatgcactatgcaaaaaaggggatcattacacctgagatggaatttatcgccattcgtgagcatgtgtctcctgaattcgtcagagacgaggtagccagcggccgggcgattattccttcaaacattaatcaccctgaaagtgagccaatgattatcggccggaattttcatgtgaagattaatgcgaatatcgggaattcagcggttacgtcatccattgaagaagaagtggaaaaaatgacgtgggccatccgctggggagcggatacgatgatggatctctctaccggaaaagatattcatacgacgcgtgaatggattatccgcaattgccccgtgcctgtgggaactgttccgatttatcaggcgcttgaaaaagtaaacggcgtagcggaggatttaacgtgggagatttatcgtgatacgctaatcgagcaggcagaacagggagtggattattttacgattcacgcgggtgttttgcttaggtatgtaccgctgactgccaaacggacaactggtattgtgtcacgcgggggagcgattatggcgcagtggtgtctggctcatcatcaagaaagctttttatacacacattttgaagaaatatgtgagattatgaaaatgtatgatattgctttctctcttggggatggtttgcgtcccggatcaattgctgatgccaatgacgaagcgcagtttgctgaattagagacgcttggagagctgacgcaaattgcctggaagcatgatgttcaggtgatgattgagggtcctggacatgttccgatgcataaaatcaaagagaacgtcgataaacaaatggacatttgtaaagaagcgcctttttacacattggggccgttgacaacggatattgctccgggatatgaccatattacttcagcgatcggagcggcgatgatcggttggtacgggacagcaatgctttgttatgtaacgccgaaggagcatttagggctgccaaaccgtgatgatgttcgtgaaggagtcattacatataagatcgctgcgcacgctgcggaccttgcaaaagggcatcccggagcgcaaatccgggatgatgcgttatcgaaagcccgttttgaattccgctggcgggatcagtttaatttatctcttgatccggagagagcccttgaataccatgatgaaaccctgcctgctgaaggagcaaaaaccgctcacttttgttccatgtgcggtccgaaattttgcagcatgagaatttcacaggatattcgggattatgcgaagaaaaacgatctcagtgaagcagaagctataaataaaggattaaaagaaaaagcaaaagagtttgtcgatacgggaagcaatttatatcaataaaaaaaatgaagatggagaatgctccatcttcattttttttagaaaaacagagagcgtcgaagcggcggaatactctgttcaaagcggaaaacattttctggatcatatttcgttttgacacggcggagtcgttcaacgttttcgccgtaatatgttcttggccagtttctgatttcgatatctggccaatttacgtagtctcccatcgtttctctcgaaagggacgttctcagcccctcaatccagcggacattttgtcttttttcttcaggagatgtccagtttgttaagtattcctgggcgatgattgcatcacgataataaaatgccgtttggtcgggagcgatccgtccggctgccccgccgagtgcttgctgccagacactggcgttttgattcggagcgtgctctaaaaagtgttttattgttgagatcggacgttctgataatggcttttcaatgaaagagccggagcgtttcattttttgaggctgattgcctcccgggctgttaaaaaaggttaccgcttcgatgaacggcattgtttttaccattccgcttgttgggcttcctgctttcaataaagtctttaacagtttttttaactctgtttttggcccgacaaattggccgagggcttctatgcggtttacttctttaggccaaaactctattgatgatgtaagccggtcatctgtatacggggcccagtgctgccacgtgttaaatacttcctcaaaatcatcccatccccatgtaatagaaaaaatcgacacttgagagatgggcactgctttaaatgtcatggaggtgactatgccgaaattgcctcctccgcctccctgagacgcccaaaataagtctggatgatttgaacagctgactgtaatcagatcagcgccctctttttcgtctgctacgatcatctcaagctgcacgaggctgtcgcaagtaaggccggcagcccttgttaaaagtccaattcccctccgagagttaaacctgtgagccctacattggcaatggtgcctgcgggaagcgtcaggccgtattgccagagtgtccgatagacttctcccaattcagcccccgcttcaatataggccagctttttatcctgattcacagttatttttttcatttcgcttaaatcaataacaagaccgttatttaaaagggaaaagttctcatagctgtgtctgccgcctctaatacggaaaggcacacggttttcacgcgcccatttcagcgcattgagtgcatcctgtttgttttggcaaaacacaatgatgtcaggatacctttctaagcttaggttaatattggttcttgcttcgttatagtccggatcatcccgtgtcacgatacgtccggtcaattttgtcttttccacactcccacatctctttctctcgtattctagtttctctagcttatgcgtcaagggaaaagagtgtataaggaaaaagcggggatgcaatctgatacagtgtcaactcccttaaaaaatagttgacaggtcggtattgtatgaattaacatggtcagtacaaatttttcaaatttatcgcgctgatcggaacaccgaaggctcttatcgtttagataagggccttttttgtatgaaaaaggagggattattgatgggagtcaaaaaagaaaaggggagaaaacgattcagaaagcgaaaaacctacgggaatcagattttgccgcttgagctgctgattgaaaaaaacaaacgagagattataaacagcgcggagctcatggaagaaatttatatgaagattgatgagaagcatacgcaatgtgtaactaaatagaaaaaaacccgctgattacagcgggtttttgcatttctacattaagcatcttttttaatcggcaatccaaggccttctgccacgcgttttccgtattcaggatccgctttgtagaagtgctcgatttggcgcagtttgatttcttctttttctaccggcttcatagcattaacgatattttcaacaaggcgggtacgttcatcttcactcattaaacgatacagatcaccggcttgagtgtagtgatcgttgtgatcgtagcttacgctgtcagcgatgccttgtaccggatatgctgcttgcttatcctcaggtgactcttttggaccgccgaagctgttaggctcgtaatacacagatccgccgccgttatcatcaaagcgcatttgtccatcacgctgataattgtttactttgttgcgtgcgcggttgattggcagcgcttgatggtttgcaccgacacggtagcggtgtgcatcatgataagcaaacagtcggccttgaagcattttatccggtgaaacatcaataccaggcacgagtgttccaggtgaaaatgtcgcttgttctacctctgcaaagtagttttccggatttctgtctagaaccatgcgtccgacctcgattaacgggtagtctttttgagaccaaacttttgtgacatcaaacggatcgaaacggtacgtgtttgcatcttctaaaggcatgatttgcacatatagtttccatgcaggataatcaccgttttcgattgcattgaaaaggtcttctgtatggtaatcagggttttcaccggcaatttttgctgccgtattgacatcaaggtttttcacgccttgttccgttttaaaatgatatttaatccatacgccttcgccttcggcatttgtccatttgaatgtatggcttccgaagccgtgcatgtggcgaagtgttgcaggaattccgcggtcagacatcaggattgtcacttggtgaagtgactctggtgaaagtgaccagaaatcccatacagccgttgggtttttcaggtgtgtttttggatctcttttttgtgtatggatgaaatcagggaacttaatcgcatcgcggataaagaatacaggcgtattgttgccgacgatgtcgtagtttccttcttcagtataaaatttaacagcaaatccgcgcgggtcgcgaactgtgtcagcagagccaagttcaccggcaactgttgagaaacggatgaacaacggtgtgcgtttgccgacttcagaaaggaaagcggctttcgtgtattttgttacgtcgtttgtcacttcaaaatatccgtgtgcgcctgctcctttggcgtgaacaacacgttcaggaacacgttctcggttgaaatgggccaatttttcgagtaaatgtacatcttgaattaaagttggtccgcgagaaccggcagtcattgagttttgattatctccaaccggagcgccccagctagttgtcagtttatttgaactcatgttatcacctcttggaatttataagaacataatatcatctctaagtaaaaagtcaatattattttataattattataaaatagttatctctattaagcgatatctagtattgaaagtgtggaaaaaccttgttggaacagctttttatggcacttgataatttttgaagaaataatttttccttctctatttgcgaaacaagcagagtaagtgataaacaaggatatcaaaaatcgtatttaaaaaagagttgacatatcggaataatttgaattaacatgttattcaaacaaaaaacaattgggcagctgatcggaccgccgaaggctctcatctctacaagaacagagatgggggcctttttgttttttttgaaggcggggttggcagaaagagagggataaaagtggctgtgaccatcagcatcaaagaaaaggcatttgttcaagagggccgcaaaaacacggtcttagagaacatagaattatcaatcgcaccaggcgaatttctaacgcttatcggaccgagcgggtgcggaaaaagcaccctgttaaagattattgcagggcttgattctgaatatgacgggagtgttgaaattaacggccgcagcgtaacagctccgggtattcagcaaggatttatttttcaggaacaccgcctctttccttggctgactgttgagcagaatattgcagccgacttgaatttgaaggacccaaaagtcaaacaaaaggtggatgaactgatcgagattgtcagattgaaaggatcggaaaaagcatatccgcgcgagctgtcaggcggcatgtcacagagagtagccatcgcccgggcccttctgcgggagcctgaggtgctgcttttagatgaaccgtttggtgcactcgacgcttttacaagaaaacacctgcaggacgtgctgctggatatatggaggaggaaaaaaacaacgatgattctcgtgactcatgatatagatgaatctgtttatttaggaaatgagcttgcgatccttaaggccaaaccggggaaaatccataagctgatgcccattcacctggcgtatccgcgaaaccggacgactccggatttccaagcgatcagacagagagtgctgtcggaattcgagaaaacagaagatttggagtacgcagaaggatcagggatatagaaagggcggaagcggaaatgaaaaaaggactcattgtattggttgccgttatttttctgctcgcaggctgtggagcaaatggagccagcggtgaccacaaacaattgaaggaaatacgtattggtattcagcaaagcttaagcccgcttttgatcgcaaaagaaaaaggctggttcgaagatgcatttgaaaaagaaggcatcaaagtgaaatgggtggagtttcaaagcggtccgccccaatttgaaggccttgcggcagacaaacttgatttttctcaagtcggtaattcgcctgtgatcgctggacaggcggcaggcattgactttaaagaaattggcttatctcaggatgggttgaaagcgaacggcatccttgtcaaccaaaacagcggcattcaggacgttaaggacttaaagggaaagaaaattgcagtcgctaaaggcagcagcgggtttgattttttgtataaagcgcttgatcaagtggggttgtcagctaacgatgtgacaattattcagcttcagcctgatgaagcagcttccgcatttgaaaacggatctgttgatgcctggtccatttgggagccgtacttgtccttagaaacaatgaaacacggggcaaaaatccttgtgaacggagaaagcacagatttatattccccgggttttactttagtaagaacaaagttttcagaggagcatccagacgaagtggtccgttttctgaaggtgtttaataaagccgttgtatggcaaaaggaacatctggatgaagcagcggacttgtattctgacattaaagatctcgataaaaaggtcgtcgaaaatgtgctgaaaaatactgaacctctgaatgaggtcatcagtgacgacattgtgaaagcgcagcaggaaacagcagattttcaatttcgaacaaaggcgatagataagaagattgatgtgaaggatgttgtcgataacacttttatcaaaaaagcattaaaggaacattcctcaggaggtgatcaatgatgaaagcagaggctgcgggctcgctgcccaaaacgaatgcggaagcggtgcgaaaaaagcccggaaggaagagatacggctggatgaaggggcttttactgcccgctgtcatcattgccatctggcaggtcatcggcgggctgggggttgtgtccgctacagtgctgcctacacctgttacgattgttctgacctttaaggagcttattttgtccggcgaactgttcggccatctgcaaatcagcatttatcgggcggcacttggttttttgcttggcgcggggcttggattgatgatcgggattttggccggattttccaaacggacggagctgtatcttgatccgtcgttgcaaatgcttagaaccgtacctcatctggccgtcacgccgctgtttattttatggttcggatttgacgaagtatctaaaattttgctgattgcgctcggtgccttctttcctgtctatatcaatacgtttaacggcatccgcggggttgacgcgaagctgtttgaagtcgcccgggtgcttgaatttaaatggcatcagcagatatccaaagtgatattgccggcagccctgcccaatatattgctaggcattcgcttatcgctcggcattgcatggctcgggctcgttgtggcagagttgatgggctcaagctcgggagtcggctatatgatcatggatgcgagacagttttcacaaacgaataaagtctttgcagggattatcatttttgcagtggttggaaagctgacggattccttcgtcaggctgctggaacgaaagctgttaaagtggagaaacagctacgaaggataaaagatataaaggggagatgaatatggaaattctttggtttataccaactcatggagacgcgagatatttaggatctgaaagtgatggacggactgcggatcatctttactttaaacaagtcgcgcaggcggcagacaggctgggatatacaggagttcttctgccaacgggaagatcgtgcgaggacccgtggcttacagcgtcggcactggcaggagaaacaaaggacttaaagtttttagtcgcggtaagacctggtttaatgcagccttctctggcagccagaatgacatccaccctagaccgcatttcagacgggcggctgctgatcaacgttgtggcagggggcgatccgtatgagctggcaggcgatggcctgtttatcagccatgatgagcgctacgaggcaacagacgaatttttaaccgtttggcggagacttttgcagggagaaacggtttcctatgaaggaaagcatataaaagtggaaaacagcaatctgcttttcccgccgcagcaagagccgcatccgcccatctatttcggtggttcgtcacaggctgggattgaagctgccgcaaagcatacagacgtatacttgacatggggggagccgcctgaacaagtaaaagaaaagatagaaagagtcaaaaagcaagcggcaaaagaagggagatccgttcgatttggcattaggctgcatgtcattgcccgtgaaactgaacaagaggcatgggaagcggcagagcgcttgatcagccacttggatgatgacaccattgccaaagcgcaggcagctttgagccgttacgactctacaggccagcagcggatggccgtccttcatcaaggcgatcggacgaagcttgaaatcagtccgaatctgtgggcggggatcggcctagtcagaggaggggcaggaacagctcttgtcggtgatccgcagacgattgccgaccggatagcggagtaccaggcactcggcatagaatcgtttatattctcaggctatccgcatttagaagaagcgtattattttgcagagcttgtatttccgcttttgccgtttgaaaatgatcggacgagaaagcttcagaacaaaaggggagaagcggtaggaaacacttattttgtcaaagagaaaaatgcatgagtttaataaaaatacagcccccaaacatggtatgatattcaaaaaaagggggctttttttctgaaaacattgagaagcgcggcagtcatttgcctcatagctatgctgtcagcatgcggacattcaaaacagatggaaatcaaagcggcggacatatcagaacttgaaaaaaacagaatggatgtcgcagcttcacaggcattcactgccgaagccgtcaatatcggtgaaggtgtttcttcagctgacatgtacatcgaacattatcaaaagggaaagcttgttgagaggtttggaccggctagtgcagattattcagaggaaaaacccgataccatacaatttgtttattttgagaaggaagagggggaaggaaagaataaacataccaccattcattttggcattgtggataaacagggaaatatagcggctgattcatcggtgaaacgtgacgatagcacaacacaggaaatgactcagaatatttcatcgccggaaccgattactttcgagaagcctgctttgatcggcagcagtattagagggactgacgagacaatgcacacctctgaacataaaaaagagctcattaagcatcaagatgcgttactgtattatgtggaattgcatcattagaatgggcggcttcaggccgtctgttttacaaagcggtatgcttgcttttttgaatggtgcatgatacattttaaatagtaacaatttcgatttaaagggaggctatgtgacttggctaaaaaatcaaaagtggcaaaagagttaaaacgccaacagcttgttgagcaatacgctgatattagacgcgagttgaaggaaaaaggagattacgaggcactcagcaagctgccaagagattcagcaccgggaaggcttcacaaccgctgcatggtaacggggcgcccgagagcatatatgaggaagtttaaaatgtccagaatcgctttcagggagctggcccataaaggccagattcccggtgtgaaaaaagcaagctggtaagaaaaaactccggccgattacagcgcgccggagtttttttcgtttttcttgaaagagatgacgtaggaaaggtgctggatgatcatgatgataaacacaataataatagggaaaaacggaatacgcgattgaaaaagcggataaaaaatgagaagaaccgctgcggcaggcagcgagaagtagacagcgatatatgacgcgcgacatgcttttgccgtcatcatctgctctctttcatcctgctcttcaaactcatcaggcagaagaagctgctttctggcagggcggctttttttctgtaagtacaaataaaccgcaaacgccgcaacaaacagaataaagggggtgaggtttaattcaaataccatcccgccgctctttgtgccgaaaaaagatgctatgccttctgaggcttcaaagtatgaaatcagcgcccagcatgcaaggccaaataaaacaaggtgaaaagctgcttttgttttcatgctcatcttagttttcctcctctaaccaaaagacatcctccattttcatggagaaggctttgcagattttcagtgctaacagcagtgagggaacataatcgcctttttcaatcgctgccacagtctgtcttgtgacgccgaccgtttctccgagtttttcctgagaatagccgaagcgtgccctcagctcttttactttatttttcatcatgacgtctgtccccttcacaatctcgattgattatattgtatagtatacttaacattatgtaaatggaacttaacaactttacaaaaagataactttttttcgacaaaatttttatattcccttgacgaaaaataaataaacatgtaatataaaaaaagtcagagcggtactgttgctgacaatcacaaatgcgggtgtagtttagtggtaaaacctcagccttccaagctgatgtcgtgagttcgattctcatcacccgctccatacatacgttattaacgcagtgtttcgtttctcagataaacgaagtattgcgtttttttatgtaaaaaagaacacgacattcgtgttcttttacgtaagccaatgtactgtatgggtgccgccgtgaatttgttcaaacattttcgttaatgatgataagaggttaacagcgctgcttttctcaatcgatggcgggaaaaaaatgatttgcagcatattcttagtctcgtttgaaacgggatagtggttgacgctgtttttgaaatcgccaaaaatgccgttttcatcagagaaaagcagtatgttttctttttctcccaatgagatccggaccggctcatgaagctttccggcatcataaatcataataggcagagaatattttaatgcgaaaaaatcgattgtgtcatgggccgagtctttactttccatgaattgttccttggatatcgggaccagcatgtcctccattggggttgtttctccctcaaatgaagggttaagctgtttaaagagtttctgccattccttgacgaaggattcatcggatataccgccgtccgcatagtcgaaaaacaaggattcttgaaacaggcggagtctgcctttcagcatttgcggtgaggagccgacttcgatattctcataaatgacagcagctgcatgtaagccggccgcacgttcagtaataacagaatcaagtttgatattcactagcattcactccagttacgtgatatcaacctattataaacgctgtatcgttttatcacaaagaaaggaggctgtgcaaaacatgaacgtttatcagctcaaagaagaattaattgaatacgcgaaaagcattggcgtggacaagattggttttacgactgctgatacttttgacagtttaaaagaccgtttgattcttcaagaatcactcggctatctctccggctttgaagagccggatatcgaaaaaagggtgacgccgaagcttcttttgccgaaagcgaaatcaatagtggcaattgctctcgcatatccttccagaatgaaggatgcgccgagaagcacgagaactgagcgcaggggcattttttgcagagcttcctggggaaaagactatcatgatgtgctgagggaaaagcttgatctactggaggattttctaaaaagcaagcatgaggatatcagaacgaagtcaatggttgatacaggtgaattgtctgatcgcgccgttgcggaacgtgccggaattggattcagtgcgaaaaactgtatgatcacaacacccgagtatggctcttatgtgtatttggcggaaatgatcacaaatatcccttttgagcctgatgtgccgattgaagatatgtgcgggtcctgcacgaaatgcttggacgcctgcccaacgggagcactggttaatcccgggcagcttaatgcgcagcgctgcatctcttttctgacccagacaaaaggatttttacctgatgaattccggacaaaaatcggaaaccgcctgtacgggtgcgatacgtgccaaacggtatgccctctcaataaagggaaggattttcatcttcatccggaaatggagcctgatcctgagattgccaaaccgttattgaagccgcttttgaccatcagcaatcgggaatttaaggagaaattcgggcatgtctcaggttcttggcgcgggaaaaaaccgattcagcgaaacgccattctcgcgcttgcgcattttaaggatgcttccgcactgcctgaattgacggaactgatgcacaaggatccgcgtcctgtcatcagggggacagccgcatgggcaatcggaaaaatcggagaccccgcctacgcggaagagcttgaaaaagcgctggaaaaagagaaggatgaagaggcaaagctggaaattgaaaaaggaattgagttgctaaaagcttcaggcatgactaaacaaggcctgtcctgacatacgtatagagcagaaggaaaaaacacttgagatcatccaagtgttttttctctataaaaaagtatggcgggtggggtgagcttgaagtacattttagaacaattagcggaggagcggctgggctttctggttaacgggcatgctatgagacaggagtctcaagtcggagaccttaaagtcatggagcgtaagaaaaagcttctggaaaaacgtaaagttgacatcataaaagcgaaagcaaaggccgtgattaatcatgtgcgggttgaggatgacggaacgacctgcctttcgtataccatccattacgaatacgtgtgtaaggaacaagatgacagcttgtatatagaagagcacatagaggagcgaatggctttcctgtatgatcacattttgattagtgatcaggaaattgcgaaaaagccggctggatttcatgaagggaccagtattattgactattctgaagctgaagaggaaagagaagcgtttggcagggcttttcaatacgatcgtctcggcgctgtccaatatgccgagaaattttggaacaagcgcaatcctgcttataaaaatttcagcgataactgtacaaattttatttctcagtgtcttcatgcaggaggcgcgccgatgcgcggtcatccgaacaggggatcaggctggtggatgaaacaaagctcatggagctacagctggacggtggcgcactctatgaaaatgtatttgtcgaattcaaaggccggactgcgtgcggtgcgggtgaaatcagcggaagaactgatgccgggcgatgtgatttgctatgacttcgaaggagacggccgctttaatcatacaacgattgtcgtggcaaaggacaaaggcaatatgccgcttgtcaacgcccagacctatgacagcaggatgaggtattggtcatatgaggattctacggcatacacgccgtcaatacgatatgccttttttcatatcgttgatgatacgacaaaagagtaattaatgttataatgatgggcggataagaaaaacagaggtgaacattgtggcattacatgtcgttttatatcaaccagaaattcccgctaacacagggaatattgcacgtacttgtgcagcaaccaatacaacgctacacctgattcgtccgctcggcttttcaacggatgataaaatgctgaagcgtgccggactcgattattgggagtttgttaacgttgtgtatcatgattcgttagaagaattgtttgaggcatatgaaaaaggccagtttttctttattacaaaattcggccagcagcctcatacatcatttgattacactgatcttgacgaggattatttcttcgtgttcggaagagaaacaagcggtttgccaaaggatttaattcaaaataatatggaccgctgcctgcgtcttccgatgacagagcatgtcagatcgttaaatctgtccaatactgccgcgattcttgtttatgaagcgctgcgccagcaaaattaccgtgatttaaaatagtgaaaaaacccgctcatcgatgatgggcgggtttttttgcggatgttgaaatgctttgtttcgtttttgggcttaacaacgtaacagtgttatgttacaatgtacccatcaaaggagctggacttatggaagaacaattaatctctaaaaaagaattacttgaaagaacatcgatttcatacggtcagctgtatcgatggaagcggaaaaacttaatacctgaggaatggtttattcgtaaatccacatttacagggcaagagacgttttttccgagagaggagattttaaaacgtatatcaatgattcaaaagatgaaagaaaatttgtctttggatgaaatgagggaaatgctgtcgccgaaaatgaaggatgtcagcatgaccgctgatgaattgcttcataaaggtttggtttcaaggcctgctcttgaagcctattcagaagacggaggaagtccggttttttcatccagcgatttgctttcgctatatgtgcttgagggactgctgcagtctggaaatgtcagccttgcagaagcaaaaatggctgcagaggtattaaagaagcatgataatgaagagattgaaaaacagacggagctgattgtgctccgcaagctcggtgtcacaacttgttttatagcggctgcggcggacagcattttgtttgaatcatccgtaaaggttgtggaacgggtagatttattaaaagcttcagaggaattaaaaacaacatttatgcaggagggccatcgatggatgtagtggaaaagctggtgataaacggatcaggaagttcaaagggaggaacatttcaatctgttgagattaatggcagcgggacagtggccggggacgtggagtgtgacactttttcttttaatggaaacggaaaagctgacggcagcgtcaaagcgaaagcggtaaccatcagcggttcaggaaagatacatggagacgttgaagcagaatctatccggatgaatggcacttgttttattcaaggagaggtatctgcaaaacaattgaaaatcgctggatcatcaacatttggcggcactgtcaaggctgatggcattgacattagcggaaaagctgtcatggaagcagattgtgaaacagaaacctttcaatcagaagggaaatgcaaaatcagcgggcttttaaatgcagaccaggtgatcattaagctttctgcaggggaaagctatgcgcgggagatcggctgccgccatcttcaagtgacctgcagaaaaggaatgctgacattgctcagattgatgccgcagcctgttctaacagcagagctgatcgaaggtgacgtgattgaattgacaaatacaaaggcgaaaaccgtgcgcggaaataaagtgatcatcggcccggattgccagattgaaaccgtcgaatacagcggggactatacctgtgatccaagcgcatcggttgaaacatccacaaagttgtaaggaggatcgtaatggagacaacaaaactgggaaatttaaaattatatggcgctgggcatgccgcaggaggcgcgtatcacaatgtcagcatcaaaggagaaggtgtagttggagaagggttgtctgctgtaggctgccgcatatacggaacgggcctttttctcggaaaagcagagactgagcggctgcgtgtgctcggagaaagtgaatgtaaaggcgatctgacagccggcaaaatcaatatatatgggataatgaaagtcagcggctcacttcaatttgatcgattcaatctgaaaggccagactgaaattggcgggaatatgactggagaatcctgcgatgtgaaagggaagcttagcgtaaaaggtgattgtgaaacagaaatgttccatgtcacaggctgtgttgatgtatcggggttattaaattcgggtgagatcaagctgggattgagccatgatataagccatgtgcaggaaatcggcggaacaacaattacagtgaaaagacgcgcgagtttttttaatcggaagaaagtgaagctgatcgccgatgtcatagaaggcgatcgggtttatttggagaataccgaagcggcagtcgtcaggggaaaagaagtgatcatcgggccgggatgcagtatcggaacaattgagtacgaaaacaaatatgaatgcgatccgcattcacagattaaagaaaaaacaaaactgtaaaacattgttctgttatacaaaaagggtgctctttcaggagcacccttttttattcttttccaggcttgctttcgtatcctgcggtaaaaattgatactaaaaaagtgacaatgacacccatcatgatgattgttttcaccgtctctccccctcttcaatttttccgtgctgtccgagtctggatgattctgtatttttctttattatgaacggtcgcagtctgccttgtcaacgatgtataagtatctttatttttaagaaaccaaagcatgtatcacgagatggcggcatagattgtatcaaagtaccttatttgcatagtgtatcaaacatgatagaggaggtccttatggatatattaaagaaaattgaacagtacagagaggaagagcagcggctgaaatgggaaggaactttcgccgattatttggagattattaaagaaaatccgatggtcgcgcaatctgctcattctcgagtttttaatatgataaaagacagcgggatagaggagattgacgggcgcaagaagtacagtttttttgaccgcgagctgttcgggcttgaagaatctctggagcgtcttgtggaagagtattttcatccggctgccaaacgtctagatgtcagaaagcggattctattgctgatggggcctgtgagcggcggtaaatccacgctggtcacaatgcttaaaaaaggtctcgaagcgtacacgctgacagataatggcgctgtatatgcgattaaaggctgcccgatgcacgaggaccctctacatttaatcccccatcatttacgcgatgacttttacagggaatacggcattagaatagaaggaagtctttctcctttaaatgtcatgaggctggaggaagagtacggaggaagaattgaggatgtgaaggtggagcgtatcttcttttcagaagataagcgtacgggaattggaacattcagtccctctgatccgaaatctcaggatattgccgatttgacggggagtattgatttctcaacaatcgccgagtacggttcagaatcagatccgcgtgcttatcggtttgacggagagctgaataaagcgaaccgcgggatgatggagtttcaggagatgctgaaatgtgatgagaaatttctctggcatttgctttccttgacacaggaagggaattttaaagctgggcggtttgcgttaatttctgctgatgagctgatcgtggctcacacgaatgaaacggagtttcgctcatttatttctaataagaagaatgaagccctgcactcaagaatcatcgtgatgccggttccttataatttaaaagtgtctgaggaagagagaatttatgaaaaaatgattgcagaaagcgatgtggcggatgttcatattgccccgcatacgttgaaggtcgccgcgatgttctcaatccttacccggttaaaagagccgaagcggtcggatattgatctggtcaagaaaatgagactgtatgatggggaaagtgtggaaggatataactctgtcgacgttgaggatatgaaaaaagaatataatgatgaaggcatgagcggaattgatccgcggtacgtgatcaaccggatttcttcaacgattatcagaaaaaatatggaatcgattaattctctcgatgtccttcgctccttaaaagaaggtcttgatcagcacccatcaatttcaagcgaggacagggagcggtatttgaattttatttctgccgcccgcaaggaatatgacgatattgcgaaaaaggaagttcaaaaagcgtttgtttattcatatgaagaatcagcaaaaacacttatggacaattacctcgataacgtagaggcctattgcaataaaaacaagcttcgtgatcctttgacaggagaggaaatgaaccctgacgaaaagctgatgagatccatcgaagagcagatcggcatttcggaaaacgccaaaaaagcgttccgcgaagaaattttaatccgcatctcggcctatgcgagaaaaggcaagcggtttgattacaattcccatgaaagactgcgtgaagctattcagaaaaagctgtttgctgatctgaaggatgtcgttaaaattacgacctcaacaaaaacgccggatgagcagcagctgaaaaaggtaaatgaagtcgtggcccgtttaattgatgagcacggctacaactcgacgagcgccaatgagctgctgaaatatgtcggcagcctgctgaaccgataagcaacgtgacccgtccgaatagggcgggttattttgtcccattttctaaatagtttgtcaattaaacgtgcatatgtgcatatgatgaatataaatcttttcaaaagacttgtttcataatctggcacaagccggaatacgtatgtatcacgaccacaaatggttaaggaggggaattcatgtcccaaaatgacagcggccattttttgatttctgaggaaaactggtccctccatcgcaaaggcttcgatgaccagcaacgccaccagaaaaaagtgcaggaagcgatcaaaaacaatcttccggacctcgtaactgaggaaagcattattatgtctaatggaaaagatgtagtgaagatcccaatccgttcacttgatgagtataaaatccgttataactatgataaaaataaacatgtagggcaaggagacggcgagagccaggttggagatgttgtggcccgggatggatcagacaaaaaacaagggcctggaaaagggcagggtgccggtgatcaggcaggcgaggattattatgaagcggaagtttcattaatggatttagaagaagcgctttttaaagaattagagcttccgaatctccagcaaaaagagcgggacaatatcattcatacagatatcgagtttaatgatatccgtaaaacagggttaaccggtaatattgataagaaaagaacgatgatgtcagcctttaaacgaaacgcaatgtcaggaaaaccgtcgttctacccaatttatccggaggacctgaaatataagacgtggaatgacatcacaaagcccgaatcaaaagccgtcgttttagccatgatggatacaagcggcagtatgggggtttgggaaaaatacatggccagatgcttctttttctggatgacccgttttttgcggacaaaatacgagactgtggaaattgaatttattgcccatcatacagaagcaagagtggtctcggaggaagattttttctcaaagggagaaagcggcggaacaatttgttcttccgtatatcggaagtcgcttgagcttattgatgaaaagtacaatcccgcccgctataacatttacccgtttcatttttctgacggtgacaacctgacatctgataacgcgcgctgtgtgaagctggtcaatgatattatgaagaaggccaatctgttttgctacggcgaggtcaatcagtacaacaggcattcaacgttaatgtctgcatataaaaatgtaaaagatgagaaatttaagtactatattttaaaacagaaatctgatgtttttcaggctctaaagaactttttcagaaatgaagagtctggtgtaagccatcaattttcgtaatgaaaagcccatttcagggcttttttttatttaataaaagcaagaaaacgcttgcgaaaaaaatacgggagaaaaagaaatttttcctttgacaaatcttctttcatttattaatattttatcttgtgaactattattgaggaatgaggtgaaaaggagttgactgaatcagaacgtgctttgctcacttttgaacagctcttcgatacgtctcgggcgatatataaaaaacagaagaagatattggagattgtgcttgagccttttgatattacagtccttcaatatttgctgatgtttaaaattcatcaaagcggaagcaccccgctaagcaagctggcaatgtcgcttgatcttaagcctgcttctgtgacgcggatgacagatattctgtataagcgccaattgatgaatcgatatgacagtccggatgaccgccgtatcgtcatgattcagttaaccgaagagggggaagaactgatagaaaaagccgctgtgcaatatgcaaaaatgggtgctggcttgtaccaaaagcttgatacctcccagctgcagtatttgcgcaaactagccggaagcttaacgaagcttgctgaaggctgttcagaaaaaagcggtaattaaaaacttctcacatattttcaccagctttccgcaaaatgatagaggatgaaacgaaaggagaaaacaaaatgaacagaggacgtttaattctgaccaacattatcggtttgattgttgttcttgcaattatagctggaggtgcttactactattatcaaagcacaaactacgtaaaaacagatgaagcaaaagtagcgggcgatatggctgctattactgctccagcggcaggtaaagtatctgactgggatctggacgaaggaaaaacagtgaaaaaaggcgacacagttgcaaaaatcaaaggcgaacaaactgttgacgtaaaatccattatggatggaacaattgtgaaaaacgaagtgaaaaacggacaaaccgtacaagctggtacaacaattgcacaaacgattgacatggacaacctatacatcacagcaaatattaaagaaacagatattgcggatattgaagtaggaaatagtgtagacgtagtagttgacggagaccctgatacaacatttgacggtactgtagaagaaattggctatgcgactaactcaacttttgatatgcttccatctacaaattcaagcggaaactacacaaaagtaacacaaaaaattcctgtgaaaatttcaatcaaaaacccatctgataaggtgcttcctggaatgaatgcatctgttaaaatttctgagtaaaacagatcagtcatcaaaccatgaaaggaggttgtcttagatggctacaggcaaagaaaaaaatgcaaaaaaccctatgtcattgctgattgtgctaatggcgggtttatttttggcaatcctaaaccaaacactgcttaatgttgcaatgccgcacttaatgactgaatttggcgtaagtgcaacgacgattcagtggcttacaacaggttacatgcttgttaacggtgtattgattccgttatctgctttcctgattacacgatttggccaacggagtctctttctcgtcgcgatgttttgttttacgctcggtacgttagtctgcggtatcgcacctaacttctctacaatgctgatcggccgtttgattcaggccgtgggcggaggtatcttgcagccgctcgttatgacaaccattctgttaattttcccgcctgaaagcagggggaaaggaatggggattttcgggctagcgatgatgtttgctccagcggtcggcccgactctttccgggtggattattgagcattatacatggcgcattatgttttacggtcttgtgccgatcggcgcaattgttatcattgtggctttcttcatctttaaaaatatggtggagccgcaaaaaatcaaactcgatactcttggcgcaatcctatcgattgtcggattcgcctccttattatacggagtcagtgaagccgggtctgacggctggaccgacccgattgtattgtctacagttattatcggagccattgcaattgttgcttttgttgttcagcaattgcgtcatgatgatccgatgcttgatttcagagtgtttaaatatgacattttctcactctcgagtgtcattaatatcattataacagtggcactttacactggtatgttccttttaccgatctatctgcaaaacctggtcggctttacggcgcttcaatccggtctgcttctgcttccgggtgcgatcgttatgctgattatgtcaccgatctcaggtattttgttcgataaattcggaccgagaccgcttgcgattatcgggcttctcgtgacagtggtaacaacatatcaatacacgcaattgacaattgatacaccatatacacacatcatgctgatctattcaattcgtgcatttggtatgtctctcttaatgatgccagtcatgacagccgggatgaaccagcttcctgcccgtctgaacagccacggaacggcgatgagcaacacgcttcgccaaatcagcggatcaatcggaacaagtttaattacgacgatttatacaaaccggacgacattccattattcacaaattgcagataaaacaagcacggcggacccgaacttcctccatgcgttccaaaatgcagtttcgaatttaatggtgaatatgaatgtgtcttatgatacggcgaaaacatatgtgtactcacatatttataaacacgcgtcactcgattccaatgtcatggggataaatgatgcctttatgtgggcaaccttattctgtgtagcaggtttgattttaagtatcttcctgcgtgacgtcagaaaagataaattgcgtaagaagaaaaaagaggagctttcattacttcctgctccaaaagaagctaaggaatcttaatctgtacagggaggtttcctgaatgaaaatttatgtagtgtatgatagtgaaggcgaacatactaaagtgcttgcagaagcgattgctgaaggcgcgagagaaaacgacgcggctgaagtgttcatcgaccatgtagatcaggctgatatccgcaagcttaaagatatggatgcgattatttggggatgcccagggcatttcggaacaatcagctccggtcttaaaacttggatcgacagacttggctacttgtgggctgaaggcgagctgatcaacaaagtcggtgctgtcttctgcacaacggcaacaacacacggcggcttggaaatgacaatgcacaatttaatcacgccgatgttccaccaaggcatgattgttgtcggactgcctggcaacgtgcctgaaaacgcactttatggctcttattacggagcaggtgtcacttgtccggtagacagtgatgagttaatgtctgaggaaggtattcagcttggacgcgcgttgggaagacgtgtcagccaagtcacaggaaacctaacagcaggacagtaaggagaggttgaaatggccattattatagcaataattgctgctgtcattgtcattgcggcccttattacatttaacgtccgcaacgcctcacctggacctgagaagcaagaagcaaccgatagaatcgcacctccagaagagggaaaaaacgaagcgcattaccctgctgaagcaagggctgccgagcatacgccatccgttgtcaaaaacgattctccaaaagagaagcgtgacacaatgggtgatgatatttacaggcaggcgctgcaaaagtttaagcattctgatgaagttcatgcagaagaagaggtcactgaggaaagtgacaaaatgcaggaccgcagctatcgtgatgcgctgctctctatgaaaaataagaaaaagtaatgaaaaaggcaaatccgttttctcatgcgggtttgccttttttgctgtttccatcaattcggtttttatcaaataaatccatggaatatgttgtattccatcttgatctagtgtactatgttactcatacaccgagggttttttctgggaggtaaagacatgaattcttttttaggtttattaaagaaagatatcaagctttcaagaatgtggctgctagtatggatatgcggaatcattttcttattgggaacaggccatattatagcttctcgcacgaaagaacctctagtcatttttggtttttttgttgcagttgctttttttctgcttttcttatctcctgtttttgtgttttatcaccttcgcaaggaagggaaatcacagctttggctgtacaatccaaatggcggcttctggctgttttcttctaaattggcagcatctttgctctatcaatttgtgattcagttggcattaacagcctatggcatatggatgtatcatatgctctctgtaaaaaatctgctggagcatcaagttgatataacgagtacagtggctttgctgaatatgtatgggcttatttcttcgttagatatgtcagtaacagtcattgtgttttggactgtttttcactctctcagaaattggcgcagaatgcggtgggctgcgatggttctgttggttgcagtgtggttattcttcgatgaatacatcataagccctttggttgaatctcaaaagcatttctggcctgtaacagtctattgcaattttgatttccacttctacaatgtttggagattggaattaaaacctatccatctgtctgtgctagggtttcctattactttagtcatcacattcttgctgctcattatggcttcaaaactgcttgatcgtaaagtagaggtgtaaatatggacaatcaattccaatcctcgaaaccgatttatctgcagatcgctgatcagatcttttataggctggtcaggaaggagctgctcccaggagacaagcttccttcagtaagagaaatggcgattcaaactaaggtaaatcccaatacaattcaaagaacttacagtgagatggaaaggctgggtattgtggagacaagaagaggtcaagggacgtttattgcggaaaaagcagaaatcgtagacgagctgaaagacaagctgacacgagaggtgctggaaggctttgtcaagcaaatgaaagagctggggctaacgaaagaggaaatggtagaagggattaaaacattcacagagggaggctaaaatgggaatcaagctagaacatgtatcaaaaaaatacggccgccatacggccgtcaatgatgtgtcaatcaccctatcatccggacggatttatggcctgatcggaccgaacggcagcggcaagtcaacgaccctgaaaatgatggctggccttctgtttccgacttcaggatttgtgaaagttgatgaagagcaggttacgagagaaatggtgcgtcaaacggcttatcttactgagcttgatatgttttatccgcatttcactgttaaagatatggtgaatttttatcagtcgcagtttcctgattttcaaacagaacaggcttataagctattgaatgagatgcagctgaatccggaaaaaaagatcaaaaagctatcaaaaggaaatcggggccggctgaaaatcgttcttgctttagcgagacgggcagacgtcatcttgcttgatgaacctttttccgggcttgatccgatggtcagggattccatcgtaaacagccttgtgtcgtacattgattttgagcagcagattgtcgtgatcgcgacacatgaaattgatgaaattgagactttgttagacgaagtaatcatcctcgccaatggagaaaaagttgcgcagcgtgaagtagaagatattcgtgaacaggaaggcatgtctgttttgcaatggtttaaatcaaaaatggaagtttgctagaaagaggaggaatatgatgaaaacagtgttggaattgaaaaacgtgactaaaaacatcagaggccgaacgatcattgatgatctcagttttacgattcgtgaaggcgaggtattcggttttttgggaccaaacggagcggggaaaacgacaaccatccggatgatggtggggttaatgaagctgtcgaaaggtgatgtcctcatttgcggccaatcaattacgaaagaatatgccaaggcgattaagcatatcggagcgatcgttgagaatcccgagctgtataaatttttgagcggatataaaaatctccagcaatacgcaaggatggtcaagggtgtcacgaaggaaaaaattgatgaagttgttgaactggtcggtttaacagacagaatccacgacaaggtgaaaacatattctctggggatgagacagcgtcttggcttggcacaatgccttctgcacgatccaaaagtgctgattttggatgaaccgacaaacggccttgatccggcggggatcagagaaatcagagatcatttaaagaagctgacccgagaaagaggaatggctgtcatcgtttcaagccacctgctgtcagaaatggaactgatgtgtgatcgaattgcgattctgcaaaaaggaaagctgatcgatattcaaaatgtaaaagatgaaaacattgatgagaacgatacatatttcttccaggttgagcagccgaatgaagccgctgctgttttaaatcagtacgatttgctgagtaagacaaatggtgtagaaatcaaactggctaaagacgaagtccctgcggttattgaattgctggtgatgcagcaaatccgtatttatgaggtcaaggtcataacaaaatcattagaggaccgtttcttagaaatgacaggtgaaacaaaagaggaggttcagcatgcttaatttgatttataatgagtggctcaaaattttcagccgtgccggaacatgggtgatgatcggaattctggggctgacaatggttggatttgcatttttagcgaatcatttttctgctggtgaatcaaattcccattggaaacaagaacttcaagcacaaaacgccgaattaaagaaagaaatcaaagaagatccttcactgaaagatgggtataaagaaacaatcacactcaacgactatcgcatcgagcataatatccctagtgacacgggctatacggtatggtcttatgtaacggattcagcaaactttaccatccttaccggtctgtttactattatcatcgcggccggaattgtcgcgaacgaatttaattggggaacgattaagctattaatgattcggccgctcagccgttttcaaattttgatgtccaaatatattacagttctcctgtttgggctcctgttgctgttgattttatttatcggttctactttattagggttgatcttcttcgggacgggtggtgaaaccgccgcgaatattcatttaatctataaggatggccatgtcattgagcaaaacatgatggggcatttggccacaacgtatctttctgaatccgtctcagccttaatggtggcgacgatggcgtttatgctgtctgcagtattcagaaacagctcacttgcagtagggttttccatctttttattggttgccggtacgactgccactgcatttattgcagcgaagtttgactgggcaaagtatatattgtttgctaatgtcgacttgactcagtatgtggatggcacaccgttaataaaagggatgactatgacgttttctatcgtcatgctggcgatctactttatcatcttcttgttgcttgctttcggaatcttcatgaagcgggatattgcaaactaataaagaaagctgttttgcataagcaaaacagcttttttgtcaaaataaaaactgcaggtttgcacctgcagtttttcatatcaatttatgcttacgcttctttagtaacgttagcagcttgtggtccgcggtttccttcaacgatttcaaaagaaacagcttggccttcttctaaagttttgaagccttcgccttgaatagcagagaaatgaacgaatacatcgtcttgaccttctacttcgatgaatccgaaacctttttcagagttgaaccattttactttaccttctaacatgaaatttcctcctaaagcgatcataacgcttaaattcactattcttgctcttaacaaactttcaagacgaaaactcttacaaaactttcttcttaaagatagttcgaacaaaaataattacctttactctaccagtaatcttcagaaaaaacaactgcttattgaaacttttttcggaaaataccatatttatttttcaatttgatatttatttgcggaaattcatctgctttctcgatatgtgatcatacgtttgccttagtattccttcattttgggaagataagtaataggaattgacaaccttattggatatgagtaaggtaaaagttaatcaatattacaaatgacaacgtttatcaactaagagagcgtatgatttttatgtctgatattgcttgcatgctctaatacatagataggagtatggtcacaatgaaaaagtggcttatatgcagtttcgtccttgttcttctcgtttcatttactgcatgttcaccgtctgcagaacatgaatcgataaaaatcgggattgctgagtctgacggggcaatatggaactatattgctcaaaaggctgaagaggcagggctggatattcagctgatccctttttctgattatgcggagtctgatatcgcacttgctaacaaagaaattgatgccaacgcctttcaaaccatttcatattttcagtcgttcacccaaaaatacaaacttaatttgacgccgctcgggacgacatacataacgcccatgggcatttattcaaaacgatatgaccgaatccaagatataccgcgaggagctgtcgtttctgttccggataaagcgttcgattttggcagggcgcttacagtgctccaggaagcgggtttgctaacgctgaaaaacggatttaacggaacaggttcagttgatatgattaaagataatccgagacacctgaaattaaaagctgtccggcaacaggatgcagtgagcggtgccgacgtgtttgtcatgaaaccatcagaagcaaaaaaagcgggcctgaacccgaaaaagcatacgctaaagagcggcggactcatgtctgaggaagagatgaatttgattgttgtcagagcggaggatcaagatcgggaagcgctgcaaaccattcttgagctttatcaagcagatgatacagcggcatttatagaaaaagaatatcagagagatcttgtcccggcttttctgcctttgaaacgtctttcagattggaagaatgaattcgaacattgaattcattcttttttttctgaaaaacacactctgttccgtcccgtttctttcgctttgtaaagcatttgatcggcaagaatgggcaaggatcctggctgttccgtattattggggtaatgagcggcccctagtgatatcgtaactgaaagctcttcgccgtttgttaatacaatcggtgcatcacttacagtgctcctgatccgttcagcgatccgggctgctttatcaagagaacagttcggcaggagaacggcaaattcttcaccgccgatccgagcggcaggatcagtatttcggatgctctgcttcagacgtaaccccagctctttgagcacctgatctccttcatgatggccatattggtcattgatggtcttaaaatgatcgatatccatataaatcagtgcaaattgaaaatgcggggtatcggccgcctgctgatacagagcttttgtggtttcttcaaactttcttcggttatacacgcctgttaaaaagtcaaagtgcgcctgaaacttatattgtttaaaaagaagatgtgcatttgtttcatgatcaataatatataaactgagcatgccgcccgctattgatatgatccaaaaatacaaatgaagttcgtatgaatgtaaatctataagaaaataaaaggaaaaggagatcaagctatttgtgattattaaaagatagaaagcatgttttagttgaactttttttcttctagaaacaatgagtgacgggatggcagcgatacaaatgataataaccgagtatagtgcagatgtgttcattgtaatcagcaagcggcctgcagtgatcatggccagggccgttgccgttgaaacccagcctccataaagagcggcaatcataatagggatatttcgaagatcaataattgaatgctgataggtaaatccaaaaaccatcagaataaccccgagcaaaccgcaggccagtcctttaacagcttgaaaggatatgctgtcttttttatgtactagcctttctttaaacaggtgggtgaagagataattaaatgtgattaaaatggtcaaatttacaaacagttctttcagcaaatattatcacccttatataaggtactaaagatggaagggaaagaaaagaaaaaaaaaggcattatataaggtttttttacttgaattgataagttaaaataattctcacttgacccatcggaattagtgtaatatagtaaatgagaaaatttgaagggagagtttacctgctttggagactttactggttgtattacatgtatttattttatttttacttatcttagggctctttgttatgcagaaaaaacatgtttccttctctaaacgtgtatttactgcgctggggctgggaattgtattcggatttgcgcttcagctgatttacggcccgacttcaaatatagtcattcaaacagccgactggtttaatattgccgggggcggatatgtcaaattgcttcagatggttgtcatgccgctcgtctttatttcgattctcggcgcatttacaaagctgaagctgacaaaaaatcttgggaaaatcagcggtttgattatcgggattttagtagcaacaacagccgttgctgcagctgtcggtatcgcgtccgcgctttcatttgatctgcaggcgattcaggttgaccaaggaagtacagagctttcacgggggcaggagcttcagcagaaatcagaggatatgacagcgaaaacgctgccgcagcagattgttgaactgctgcctggaaacccgtttttagatttcacgggagctagaccgacttcaacaatcgctgtcgttatttttgccgctttccttggagtggcattcctcggcgtcaaacacaaacagccggaacaggcagaaacatttaaaaaactggttgatgccgtttatgccattgtcatgcgtgttgtcacactcattttgagactgacgccttatggggtgctggcaatcatgacaaaaacaattgccacgagtgatcttgacagcattttaaaactgggcatgttcgtgattgcttcatatgccgcgttaatcactatgtttatcattcatttgctgctgctgacgttcagcggcttgaatccgctgatttatttgaaaaaagcggtgcctgtacttgtatttgcatttacgtcaaggtctagcgcgggtgctttaccgctgaatattaaaacacagagaagcatgggtgtaccagaagggatcgcaaactttgccggttcgttcggtctttcgatcggccaaaatggatgtgccggcatttatcctgcgatgctggcgatgatgattgctccgactgtcggccaaaatccatttgacccggtgtttattatcactgttatcgcagtcgttgccatcagctccttcggggttgccggagtcggcggcggagcgacattcgcggcgcttcttgttttatcatcattaaacatgcctgtcgcgctcgccggtttgttaatctcaattgaaccgttaatcgacatggggcgtactgctttgaatgtcagcggaagcatgacatccggtcttattacaagtaaggtcacaaaagaaattgatcaaggggcatttcatgatcaatccagagtgattgaagctgaagaagcgtaacatatgaaaacgtgtaatccaagaggattacacgtttttttaacggccgggttctaaatcctccagcatttccatcatcgtgttgtcgtccatgacattcattgcgctttgttcaaaatgaatgggttcagcataatgcggctgtctttttttcgcggctgactcagtttgcctagtttgagactgtgtatgctgatgcagtggttgctgctgtccagcgtgctggtgctgacggccattttgccgctggctttgatgctgcgaacggtcctggttatcaccgctgcttccgctgcttccgctaaatgcttgtttgaccatgtttcctacattagaagcatcaaacgtgttattttctgaatttcgtctgttcatttgtcctgtgataaacccgctaattctttggcggatctgaggtgataatgcagcaataagcatagttgatcctatgatcaatgctgcggggctgattcctcttcgctggttgaacaacatgatccctcctttgcagtgtattcatattttccccctcgttagacaaattaaccgttatatttcccgggaaagcatttcctccagatttgcatgcataattaaagccagttagaaaaacctataagtaaagtgataaaggaggaattcacatgtttggaaaaaaacaagtccttgcgtctgtgcttcttatccctttgcttatgactggctgcggtgtggccgaccaaggtgagggcagacgtgataataatgatgtaagaaacgtaaattatcgaaatccggccaatgacgatatgcggaatgtaaacaatcgggataacgttgacaacaatgttaatgataatgtcaataacaatcgtgtaaatgacgataataacaacgaccgaaaacttgaggttgctgatgaagcagctgataaagtaacagacctaaaagaagtaaagcatgccgatatcattgtggctggaaatcaagcctacgttgcagtcgttttaaccaatggaaataaaggtgcagtagaaaacaatctgaagaaaaaaatagccaaaaaggtaagatctactgacaaaaacattgataatgtttacgtttcagctaatcctgattttgtagagcgtatgcaaggatatggaaaacgtattcaaaatggtgacccaatcgccggattatttgatgaatttacacaaactgtacagcgcgtattccctaacgctgaataaataaaaaaagccgcacaatttgtgcggctttttctttgcgttaatgacacactgcgaactcaggctgcatagagtaaaaataaaaaggtacaagacggaccggctcagggagggagacgtttgcgggatggcataggaaagcgtgcggcatccgctctattcctgtgcggagtccttgtgatgctggctgtaagctcagccatcgtatcaagcgcgatgtatatcctgtcttttccaggtcaggcatctggaataacaaaagaacaagtgacgaagcacatgaagaaagagtcattcaaacaggccgatatttattacacttctaaggaaaagtccttactgccattgacgaaagaaacgcttgaatatgcggtcagtattaatcagattatgattggatattcgaatcaaaagcctattgacattattttttttcctaatgaaaaacagatggaggcttactccggtttattggatgtagttggtttttattctgagcgggagcagttgattggactgttgcctgaagagaaaaagaaactgttagaaggggacgaggtagcggtttatttgtaccagagattgttgattcatgaatactcgcaccatgcgtttcatcagaaattgaaggagcttgagacggatcccgatgagtttccgttatggtttcatgaagggttaagcgagtggattgcgaactatgaattgctcatagatccgatcacgttttctgtcgtgccctttgaccgtttgcagactgatcgagactggcaggaagccagagccgaatatgacactgatgtctatttgcaaagcttttatatgatcgatgagctgaccggcaaatacgggaaagacattatttcagaaatgattaaggaaacagcaaaaaaaggggactttgaaaaagggtttaaatcagcaacaaaggaaagtcttgatcattttgaaaaggattttaagaagaaatttgaaaaaaacagtgcggcattggatagtatctatccaatgcctttgttattagtgaagtccttgctgacccattccgccttgtgtcggaggcatttgtccttgggcaggggcgaatgaatttctcagctgttccatatcctgcgcatcaagctgaggaacctggtaatagccgtgtttgttttggtatagaaaaatttcaaatgccatttcaacatactcctgaatttgcgcagacagtacgcgtcttacggccggatttgtcatttccagagacgccatcgtcagcatagaagcttgtgctttaatcgcgcaaagcatttgtcggctgatgatgctgtcatcaatatcattcatggattgaacaggttttttaggctgtgacggctgcatgccgtaaacagcctggttgtcctccttcatcatataagttgctgttttttgtgaaggttcgcttcctgttttgaagcattctgcagttatattgtattgagatgtaatgaattgatgttgacgatcaaggatgtttagtaattcttgatccttacagaattgtctcagcatcatatactgatcaagcacagtaagtgttccggaaagcacctcatgcatatcaaacatttcatgtccgccgtggtttttatgcggtttgccaggaatacctttgttcatttgggattgctgctgctgattgaactgatccaaaccgaattcctccttttttttcagatcaactgtattttgtgtcagtctgccgtgtattatgcagaagcctgaaaggaattatatgctgtctgtcgaaatgataagcagacaaaatcgttgtcattatgtgtatattaagggaggaaatatgatgaggcgtattctgcatattgtgttgatcacggcattgatgttcttaaatgtaatgtacacgttcgaagctgtaaaggcagctgaaccgcaacagcctatatcgattgagaaggcaatacagcaaaaagaaggacaggcgcttgtcgaaggatatgcagtcggccaggctgtttccccgcagcattataagctgacaagccctttctcaaatgattataatgtcgcgctggcagaccgtaaaaatgagacatcgcccgaacacatccttcctgtgcaaatcccctccgccttcagaagccaatttgggctgcaaaccaatccgcttcttcttgggaaaaagataacggttcaaggaaagcttgaaaattactttaacacgacaggacttaaaaacgttcagtcgatgaacgtaaccgatgacacgaaaactccgccggctgaacagccagtgaccataaatgaagcacggggaaggctgaatgaagaagtaacgataaaagggatcattacagctgatcaaaacgcaatcggaggcgggaagctgtcgacctttttgcaagatgaaaccggaggcattaacatttattcgccatcccctgaacaatttcccgaattaaaagagggtatggatgtcacggtgacagggaaaatcacgtcttaccaggggctgaaagaaatcgttccaagctcatcaggcatcaaaatcaaccagtcaaatcaatccctccccgccccaaacacttaacaatcaatgaacttattaacggcagcctaggtgatcagtatgaaggacgccttgtgaaactaactgcttttgtttccttaattccaagttctcctgccggcggcggttacaatgtaacaatgattgatgacgaccatcatgcaatgacgctccgggttatgaatgaaacaggggtgataaacgagcttgatgagggcaaatggtatgaatttaccggtgtgttaagcagataccaaacctttcaactgcttccgcgaaaatcggctgacctgaagctgcttgaagagcagcccgcacctccgtctgcggagggagaatatgaagggattgttgaccgggttgttgacggcgataccattcatctcaaatctccggtgcttggaacgacaaaaatccggtttgtaaatgtagatacacctgaaacatatcacacaccaaaaaatgacgcagatgaaaatcaattaagatttggcaaaaaagcatctgactatctaaaaacggttctgtccccaggtgataaaattactgtcaaggtcgggagtgaagccaaggacagctatggcagactgctcggacaagtcataaccgaatcaggatcaaacgtgaacttagagcttgtaaaaaacggctatgctccgacgtattttatttggccggttgacaatgaagaggattatcagcaatttcaggccgcagtagccgctgcaaaaaaagatcaaaaaggaatttggaatgaaaacgatcccctcatggaaatgccgtttgaattcagagccagagagcaagggaaaggcctgacaagatatgtggggactcgtcgaataaaacatatgtgcagccagctgactggaagaagatagctgtggaaaacagaattttcttcgcttcagcaagtgaagcggagagcgcgggatataaaaaaaggcaaacggcacctcaagaacatgtgccgcttagaattctcagcatgaatgatttgcatggcaaaatcgatcagcaatacgagcttgatcttgatggaaatggaattgcagacggcacgtttggacgcatggattatgccgccgcatatttaaaagaaaaaaaggctgaaaagaaaaactcgctgattgtgcacgcgggagatatgatcggcggaagttctccagtttcctctcttcttcaggatgaaccgactgtagaactgatggaggacatcggatttgatgtcggaaccgtgggaaaccacgaatttgatgaaggcacggatgaactgctgaggatcttaaacggcggtgatcatccgaaaggcacaagcggatataatggacagaactttccccttgtatgtgccaattgtaaaatgaaatcaactggagagccctttttgccggcttatgacatcataaatgtggagggcgtacccgttgcttttatcggggttgtcacacagtcggcagctggcatggttatgcctgaaggaataaaaaatatcgagtttacagatgaagcaacagcggtgaataaggcggccaaagagctgaggaaaaaaggcgtgaaggctatcgcggttctcgcacatatgtcagctgaacaaaacggcaacgccattaccggtgagtctgctgatcttgcaaacaaaacagattctgaaattgacgtgatttttgccgcgcataatcatcaggttgttaacggtgaagtgaatggaaaactgattgttcaagcgtttgaatatggaaaagcgataggtgtcgttgatgtagagatcgataaaacgacaaaagacattgtcaaaaagtccgcggaaatcgtatatgttgatcaaagtaaaatcgaaccggatgtcagcgcgtcagccattttaaagaaatacgaaacaattgcggaaccgattatcagcgaggtagtcggcgaagccgctgttgatatgggaggggggtattcaaatgacggcgatacacctcttggaaacctgattgcggatggtatgagagctgccatgaaaacggattttgctcttatgaatggcggcggcatacgtgaagcgctgaagaagggcccgattacgtggggagatctttacaatattcagccgtttggaaatgtgttaacgaagcttgagattaaaggaaaagatttaagagagattatcaatgctcaaatctcgccggtttttgggcctgactacagcatcagcgggtttacgtatacgtgggataaagaaaccggaaaagcagttgatatgaaaatggcagatggcaccgagatccagcccgatgccacatatacattgaccgtcaacaactttatggcgacggcgacaggagccaaatatcagccaatcggactgctgggaaaaaatccggtgacagggcctgaggatttggaagcgacagttgagtacgtgaagagttttgatgagccaattgcgtatacaaaagagggaagaattaagctcgctgaagccagtgatattgaagaccctgtaacagaagacccgattacggaagagcctggagatgatccggggacggagcatccaatgaaagaggttccagagcctgatgtggatttgcctgatataaaagaaactccgggaacagcaccggttcatcagcttccgccttcagccatttcgagattcaatgaaataccaatcaacaacacaaaaaccgctgatactgctaatagcatcagcacattgccgttacaaaccgagactgcggaaagcgggtctgatcatcagcttccggatacgtcagcgggctactataactttatggtaatcggtgcggcggtgacattgtcaggaacttatctatatgtcagaagaaaaaggagcgcctccagaacgtgaaaaaagttattccactattcatcattgctgccggcctagtgatcgcaggctatggaggctttaaattaatcgatacgaatatgaaaacggaacagacattaaaagaagcaaaactggcggctgaaaagccacaggaacttttggggacgaaaaatagcacagatcaagcaaagaacaaagcatcatttaagcctgagaccggccaagcgagcggcattttggaaataccgaaaatcaatgcagagcttccgatcgtggagggcaccgatgctgatgatttagaaaaaggtgtcgggcattacaaggacagctattatcctgatgaaaacggacaaattgtgctgtcggggcatcgggataccgtgtttcgccggacgggagagctggaaaagggggatcggctccgcattctcctgtcatatggagaattcacatatgaaattgtaaatacaaaaattgtcgataaggatgacacatctattatcacgctccagcatgaaaaggaagagctgattctgacgacctgctatccgttttcatacgtcggaaatgccccgaaacgctatattatatatggaaaacgagtgacttaaaaagccgaggcagtgcctgcggcttttcttcatgaaaaatatgtgcggcaaaggtttttcatatcagcagggaaaggggcttcagcaactatgagctcgtctgttatcgggtgaaccgcttgtactttattggcgtgcagtgcctgcctgtttagcagcttgctcccgcctccgtaaagcgagtctcctgtcaacggatggccgaggctcgccagatgaacacggatttggtgtgttctgcctgtttccagctctaattcaacgagcgacagccgttctttcgcattgctggccattaccttgaaatgagtgacggcagtttgcccgcctggtgaaacccggcgtcttgtcgggtgtgaccggtctctgccgattggtgaattaattgtcccttttttcgtccgtagcttaccttcagcgatggcggtatacgtacgcttcagcgtctttttctctaactgctggtctaagatggcgtgtgccaaacgatgcttggcaaaaacgatagcgccagatgtatcctgatcaagacgatggacgtggcgcaccttacatgtttcgccatttatctgataatgataagcgatcaaattagccagtgtgccggtttgcccatcctcattcggatgcgtcgcgatgccagcgggtttattgacgatgagcatatgattgtcctcatataaaatatcaagctcgccatactccggaatgaccgaagatgcttcactttcctgaagatcaatgaacacacggtctcccttttttacaatcatattgtttaagacggattcgtgattgacctttatctgttgatgggacatccagtcttgtatcactggtttagaagctttgagcgctgttttgagtacggaaaacagccattggccgtcctgtttttcattgatgaggatctcaagccctctgcctttttggttcatgttaaatggctccttttcgaagcggaaggctgctgtttctcataggaaacacttaccttagctttcgcgtttttttctgtgctattcttgagtaagacttaggatattcgatggcaagaaaggtgattgacgtgagaattgtgaacgcagcaactgcagaacaggagagctttatcaaggagctgtctatggagctgatccatgatgtatttcctctttatttctccgaactggacattcagcgctttaaaaagaaaggcgttctgtctttaaataaccattattaccaaggaacattaaaagaagcatttcaaattatggcttgtcttcaaatgatacatattatcctgaccaagccttcgccgcactctgatttgagtgatcaggcgatttttgaaaaaaacagcaagatgctgaatgattttgggatttattttccgtttgctttttctgactttcaaaagaagactaacaaagcctttttcggtcaaagaaggctgatataatcatgcggcaagggcttttctatttttagaaaagctcttttttgtatcagagaaatcatatcataaaacctttcctctaactccctttttaaacggctcgtgtctgaacatactaatgattgaaaggggtgctgacaatgagttcagttaaagatacaatgacaacgcaggtggcaaccgtttctccgaatcaaacgattcaggaagcggcttctctaatgaaacagcataacgtcggggcgatccccgttgtagagcaaggtgttttaaaaggaatgctgactgaccgtgacattgcattaagaactacagctcagggccgtgatggccagacacccgtttcagaagtgatgtcaacagaactcgtatcaggaaaccctaatatgagtctggaagacgcgtcgcagctgatggcccagcaccaaatccgccgccttcctattgtagatcaaaacaatctagtcgggatcgttgcgcttggagacctggcagtcaatcagatgtcgaacgagtctgcgggatcagcgctgacaaacatttctcaccaaaacattcattaataagaaagagcttgcagtgtgcaggctctttcttcacataaaaccttactttttgaaagcagacttgtttcggggtatagtgagtgtatacatatgtctcaattcgtactaaaggagttgtacccagtgattaaagcgttaatttttgattttgacgggcttattctagatacagaaacacacgaatatgaagttcttcaggaaatatttgaagagcacggctcagtgctgccgctatctgtctgggggaaggtcatcggaactgcagcgggtttccggccttttgactatttagaagagcagatcgggaaaaagctgaaccatgaagagctcacacaattgagaagagagcggtttgccaaacgcatggaatcagaaaaagcgagacctggtgtcgaagcgtatttgaatgcggcaaaggatttaggcttaaaaataggccttgcctccagctctgattataaatgggtgtccggccatttgaagcaaatcggcctgtttgatgattttgaagttattcaaacggctgatgatgtggaagaggtgaagccgaatcctgaactctatttattggcggcaaagaacctgggggtatcgccagcggaatgtctcgcgtttgaggattctgtcaatggttcgattgctgcgaaacgtgcaggcatgaagtgtgtcattgtcccgaataaagtaacgggcaccttgatgtttgaagactatgatcacaggcttgaatcaatggcggagatggagctcgccctattgcttgatcatctgaactcacaaaactagaaaggagcgagtaggttgtctgagaaattagatttgacccggtttgaaaagaaaatggttatccgcaatatcgaagagaaagacatcgacaagattatcgatcttcaaaaggactgctttccaggaatggagccttggaagcgggagcatttaatcagccatttggagcattttccagaagggcagttttgtgcagaattcgaaggtgaaattatcggttcgtgctcaagtctcctgattaactttgatgaatatgatgaccgtcatacatggcaggacattacagatgacggttatatcaccaaccataatcctgacggcttgaatatgtatggaattgaagtcatggtggacccgaagtacagacgaatgaagattggccaccgtttgtacgaggcgagaaaggacttagccagacgcttaaacctgaaaagcatcatcataggcggacggattccaaactatcacaaatatgcagaggaaatgacagcgagagagtatgttgaacaggtgacacgccaccaaatttacgatccggttctttcttttcagctgatgaacggctttacccttatgcgaattaacccgaactatctcccggatgatacagcttcgatcaagtatgcgacgctgatggaatggaataatgtggattatctaccgcagcagacaaaacgctattataaatcggcgttccctgttagaatttgtgtgattcaatacgaaatgaagaaaatttattcctttgaggaatttgcgaatcaagtagaatactatgtcgatgttgcttccgacgcaagatctgattttgcggtgttcccggaaattttcacaacccagctgatgtccttccttgaggaacggtcaccgagcttggcggtgcagagaattactgagtatacagaagattacatcagcctgtttactgacttggctgtgaagtataacgtcaacattatcggcggatctcatttcgtcgaagaggaaggcaagatctataatatcgcttacctgttcagacgggacggaacgatcgagaagcaatacaaactccatattacgccgaatgaacgcaaatggtgggggatcagcgcaggagaccaagttcgcgtgtttgatacggactgcgggaaaatcgcgatccagatctgttatgacattgaatttcctgagcttgcccggattgcggctgataaaggagccaaaatcatctttacgccattttgtacagaagaccgtcaaggctatctacgtgtcagatactgttcgcaggctagagcggttgaaaatcaaatttatacggttatctctggaacggtcggaaaccttccgcaaacggaaaacatggatatccaatacgcccagtcaggcatctttgccccgtctgattttgaattcgctcgtgacggcattgtcggcgaaacaaacccgaatattgaaatggtcgtcatcggcgatgttgacctggaaattctcagaagacagcgccaaaacggtacagtgcgccagctaaaagacagacggcgtgatatttatcatattcaatataaaaaataattcccaaaaaacccgcctgaattggcgggttttttaaaacaaaagcggaattgtttaggtgctatctttaaaataaaagtaggtataatggagtttctgtattttcgccatttcctatatcatacagaaatcggctaggcttccattgctattgcaatggctgtccaagttgtttcgagtgcgacctttatcagtacgatgctgagcattgccactttgcctgttttgctttggaagctgcatcctctttcttcttgagaaagaggatattttattatttacgcggtttattgactctgacccggtctggctttatattgaaggcagggaaatcatcaccaagacatcacataaagagaaggtctgtttcaattgaattggcattatagagaacgctaatgaaatggagatgatggggatggaaaacattcagcaaaataagggattaaagcaaaaagatgagcaatttgtgtggcatgccatgaagggagtgcatcaagcggacagcctgatagcccagaaggccgagggggcctgggtaaccgacacagacggacgccgctatttggatgcgatgtccggtttgtggtgcgtcaacattggttacggcagaaaggagcttgcggaggctgcctatgagcaactaaaggagctgccttactacccgttaacgcaaagtcacgcacccgcaattcaactggcggaaaagctgaatgaatggcttggcggcgattatgttatttttttttccaacagcggatcggaagcaaacgaaactgcttttaaaattgcccgccagtaccatctgcaaaacggcgaccacagccgttataaattcatctcaagatatcgggcataccacggcaatacattgggagcgctctcagctaccggacaggcgcagcggaaatataaatacgagcctttgagccaagggttcctgcatgcagctccgccagatatataccggaatcctgatgatgcagacacgcttgaaagcgcaaatgaaatcgaccgcatcatgacatgggaattaagcgaaacgattgccggggtcattatggagcccatcattacaggcggaggcatcctaatgccgccggacggatatatgaagaaggtggaggacatttgccggcgccacggagcccttttgatttgcgatgaagtgatctgcgggtttggacggacaggtgagccgttcgggtttatgcactacggtgtgaagcctgatatcattacgatggcaaagggaatcacaagcgcgtatctgccattgtcagcgactgctgtgaaacgggacattttcgaagcgtatcagggggaagctccttatgaccgtttccgccacgtgaacacgttcggcggaagcccggctgcctgtgctttggcgttgaaaaacctgcaaattatggaggacgaacagctgattcagcgatcccgtgatcttggagcaaagcttttaggtgagcttcaagctctgagagaacacccggcagtcggggatgttagaggaaaagggctgctgatcggaatcgaactcgtcaaagacaaattgactaaagagccggctgatgccgccaaagtaaaccaagtggttgcggcgtgcaaagaaaaagggctgatcatcggcaaaaacggcgatacagtcgccggctacaacaatgtcatccagcttgcgccgccattttgcctgacagaagaggacctttcctttatcgtgaaaacggtgaaagaaagctttcaaacgatataatataaaagtgaattattaaaggagcacatgatgagttttcacaaccagccgatcttaccggctattcgcaatatgaagcaatttgatgagtttttgaacagttcattctcttacggtgttattcttgatattcatctcggccagctgaagggcgtgatcaaagaagcgcaaaagcacggaaagaacatgatggtgcacgtcgatctcattcaagggattaagcatgacgaatacggtgcggaatttatatgtcaggatatcaagcccgctgggattatttccacaagatcgaatgtgattgccaaagcgaagcagaagaaaatttatgccattcagcgcctgtttttgcttgatacaagcgcgatggagaaaagcatggagtttatcggcaagcataagcctgacttcatcgaagtgcttcccggcatcgttccgtcactcattcaggaaataaaagagaaaacagggattcccatctttgccgggggtttcatccgtacggaagaggatgtagagcaggcattgaaagcgggggctgtagctgtcacaacatctaataccaaattgtggaaaaaatatgaaaactttttgacggaaagtgattgacaccgctttcatgcactgatacaattgcactaggttaatacattgtgatggagaactcggagaccacagcagctctttacggcaaatgtttatgcacccgtaaagcggtttgttgtggtttttttattctcttcttctctatcatgctttttaatcgtgactttaggaggaatgtgctatgacagcattttggggagaagtcatcggtacgatgctgcttatcatttttggtgcaggtgtttgtgcaggtgtcaatttaaagaaatcgctttcattccagtctggctggattgttgttgtatttggatggggattgggtgttgccatggcggcatacgcggttggcggcatcagcggtgcccatttgaatccggcgctaacgatagcgcttgcatttgtaggagattttccttggaaagaggttccggtttatattgcggcgcaaatgatcggagcgatcatcggtgcggtgattatttatctgcattacctcccgcactggaagtcaacggatgatcccgctgccaagctgggtgttttctcaacagggcccagcattccgcatacatttgcaaacgttttaagcgaagtgattgggacatttgtccttgtacttggaatcttggccattggggcaaatcaatttacagaaggacttaatcctttaatcgtcggtttcctcattgtagcaatcggtatttctctgggaggaaccaccggctatgctatcaatcctgcacgtgacttaggtccgcggatagcccacgcttttcttccgattccggggaagggctcatcaaactggaaatacgcatgggttccggtagtcggcccgattttaggcggatcattcggcggcgtattttacaacgctgcatttaaagggcacatcacaagcagcttctggattgtaagcgttatattggttgtggtattgttaggactctatgtttatacgaaatcacattctgctaaaacattatcaaattcaaaatatatttaatcaaaggggagacatcttatggaaacgtacattttatccttagatcaggggacgacaagttcaagagcgattctgtttaataaagaaggcaaaatcgttcactctgctcaaaaggaatttacacaatacttcccgcatcctggctgggttgagcataatgccaatgaaatttggggctctgtcctcgcggttatcgcctcagtcatctctgaatcaggaatcagcgcttctcaaattgccggcatcggcatcacgaaccagcgcgagacgacggttgtgtgggataaagatacaggaagtcctgtctataatgcaatcgtttggcagtccagacagacgtccggcatttgtgaggaacttcgtgaaaaaggatataatgataaattcagagaaaaaactgggcttttaatcgatccatacttctccggcacgaaggtgaagtggattttagacaatgtggaaggcgcaagagaaaaagcggaaaaaggcgagctgctgtttggaacgattgatacgtggctcatttggaaaatgtcaggcggaaaagcgcatgtgaccgattactccaatgcctcaagaacactgatgtttaatatttacgatttaaaatgggacgatgaactgctcgacattctaggcgtaccgaaatccatgctccctgaagtgaagccgtcctctcatgtgtatgcggagactgttgattatcacttcttcggaaaaaatatcccgattgctggagcggcaggcgaccagcagtccgcattgttcggccaggcatgctttgaagaaggcatggggaaaaacacatacggcacaggatgtttcatgctgatgaataccggggaaaaagcaattaagtccgaacatgggcttttgacaacaatcgcttggggcattgacggaaaagtgaactatgcgttagaaggaagcatttttgtcgcaggctctgccatccagtggcttagagacggattgagaatgttccaggactcttcgcttagcgaatcttatgcagagaaagtggattcaactgacggcgtatatgtcgttccggcctttgtcggactgggaacgccttactgggacagcgatgtgcgcggttcggttttcggcctgacaagagggacaacaaaagagcactttatccgtgcgacactggagtcattggcttatcagaccaaagatgtgcttgacgcaatggaagcagattcaaacatttcattaaagacgcttcgtgtagacggaggagctgtgaaaaacaatttcctaatgcagttccaaggagacctgttgaatgttcctgtggagcgcccggaaattaatgaaacgactgcacttggcgcggcttatttggcgggtatcgctgtgggattctggaaggaccgttctgaaatcgcgaaccagtggaatctggataaacggtttgagcctgaattagaagaagaaaaacgaaatgagctgtataaaggctggcaaaaagccgtgaaagcagctatggcttttaaataaagtaatactatggtataatggttacaagttaataagaacggtcctgagatgaggagagaccacagcaccaaagtgtaagcatgcactttggctgttgtggtctctttttctatttaccgtgacaacaaggaggagacgtaatgatgaaacatcaattttcaagtcttgaaagagatcgcatgctgacagacatgacgaaaaaaacatatgacctatttattatcggaggaggaattacaggagccggaacagctcttgacgcggcatcaaggggaatgaaggtcgcactaagcgaaatgcaggactttgcggcgggaacatcaagccgatcaacgaagctggtacatggcggcttgcgctatttaaaacaatttgaagtgaaaatggtcgctgaggtaggaaaagagcgggcgattgtgtatgaaaacggcccgcatgtcactacaccggaatggatgctgcttccgtttcataaaggcggcacattcggttcatttacaacatcaatcgggttaagggtttatgacttccttgcaggtgtgaaaaagtcagaacgaagaagcatgctttcagcaaaagaaacgctgcaaaaagaacctttggtaaaaaaagacggcttaaaaggcggcgggtactatgtggaataccgcactgacgatgcgagactgaccatcgaagtcatgaaggaagcggtgaaattcggggcagagcctgtgaattactccaaagtgaaggagcttctttacgaaaaaggcaaagccgtcggcgtattaattgaagatgtgctgacaaagaaagaatataaagtgtatgcgaaaaaaattgtcaatgctacaggcccttgggtcgatcagctcagagaaaaagaccattcgaaaaacggaaagcacttgcagcatacaaaaggcattcaccttgtatttgaccagtctgtctttccgctgaaacaggctgtatatttcgatacacctgatggccggatggtatttgcgattcctcgtgaaggcaaaacatacgtgggaacaacagacactgtttacaaagaggcgctggagcatccgcggatgacaacggaggatcgtgattatgtcatcaaatcaatcaattacatgttcccggaactgaatatcactgcgaatgacatcgaatccagctgggcggggctgcgtccgctgattcatgaagaaggcaaagatccttctgaaatttcacggaaagacgagatttggacatctgactcaggcctgatcaccattgccggcggaaaactgactggatacagaaaaatggcggagcacatcgttgatcttgtccgtgatcgcttaaaagaagagggcgaaaaggattttggaccatgtaaaacgaaaaacatgccaatctctggcgggcacgtcggcggttcgaaaaatcttatgtccttcgttaccgcgaaaacaaaagaaggaattgcagccggtttatcagaaaaagacgcaaaacagctggcgatcagatacggctctaacgtagatcgcgtctttgaccgggtagaagcgctgaaagatgaggccgcgaaacgcaacattccggttcatattcttgctgaggcagaatacagtatagaagaagagatgactgcaactcctgctgacttctttgtccgcagaacgggacgtttattttttgatatcaattgggtaagaacatataaagatgccgttattgattttatgagcgagcgattccaatgggatgagcaggcgaaaaacaaacatacagaaaacctcaacaagcttttacacgatgcggtcgtaccgcttgagcaataaatcataacgggctgtctgcagcccgttatttctttttacgtggaaagggccagatctcaggttatcaagtgacagaggcacccgcttcatataaaataatggcataagctgatacataggaggacgaatatgacttggagaaagagctatgaacgctggaaacagacagaacatttagatccggaattaaaagagcgccttattgaattagagggagatgaacaggcccttgaggactgtttctataaagaccttgaattcggtaccggcggaatgcgcggggaaatcggcgccgggacaaatcggatgaatatttacactgtgcgcaaagcatcggccgggtttgcggcatacatctcgaagcaaggtgaggaagcgaaaaaacggggcgttgtcattgcttatgattcccgccataaatctccggagttcgcgatggaagcggcaaaaacacttgcgacacaaggcatccaaacatacgtgtttgatgagcttcgcccgacgccagagctgtcattcgctgtcagacagctgaacgcttatgggggaattgtagtaacggcaagccataacccgcctgaatataacggctacaaagtatacggggatgatggcggccagctgcctccaaaggaagcggacatcgtcattgagcaggtaaacgcgattgaaaatgagctgacgatcacagtggacgaagaaaataagttaaaagaaaaaggcttaatcaaaatcatcggtgaagatattgataaagtttatacagaaaaactgacgtccatttctgtacatcctgaattatcggaagaagtagatgtaaaggttgttttcacaccgctgcatggaactgcaaataaaccggtcagacgcggacttgaagcactcggctacaaaaatgtaacggttgtcaaagaacaggaactgccggattcaaacttctccactgttacatcgccaaacccggaagagcatgcggcattcgaatatgccattaagcttggggaggagcagaatgcagatattctcatcgcgacagatcctgatgctgaccgcctcggcatcgcggtgaaaaacgatcaaggcaaatatacagtgctgacaggaaaccaaaccggagcgctgctgcttcattacctgctttctgaaaagaaaaaacaaggcatcctgcctgataacggtgttgttctcaaaacgatcgtcacaagcgaaatcggccgtgctgtagcttcttcattcggccttgatacgattgatacgctgacaggctttaagtttatcggtgaaaagattaaggaatacgaggcatcaggccagtataccttccaattcggttatgaagagagctacggttatttaatcggggattttgcccgcgataaggacgccattcaggctgcgcttttggcagttgaagtttgcgcgttctataaaaaacagggaatgtctttgtatgaggcgctcatcaatctctttaacgagtatggtttttatcgtgaagggctgaaatccctgacgctgaaaggcaaacaaggagcagagcaaattgaagcgattcttgcttccttcagacaaaatccgccgcagaaaatggcggacaaacaggttgtcacagcagaagattacgcagtaagcaaacggacgcttctgactgaaagcaaagaagaagccatcgacttgccaaaatcaaatgtattgaaatacttcctggaagacgggtcttggttctgtcttcgtccttcaggaactgagccgaaggtgaaattttatttcgccgtaaaagggtcatctttggaagacagtgaacagcgtcttgcctccctttctgaagatgtaatgaagacggtggatgaaattgttgagtcaacagcaaaataattcaagtatgagctgggtcattgtaaatgatccggctttttctttttctcatccaaaagtctgaaagaaaatcatcctacaagtgaagcaatgaaatacaaaaaactggtataatcttaaatacaagatcaatgccggagtgagaaacgtgagcaaaacgaggatggaaaaattaaaaacgctgaaaacgattgcggaaaccttaaatcaagggcacgatatcaaagcaacactggatgaggttttaaaagagttgctgagtctgacaaatcttcaatccggatggatttttctgatcgaagaagatggatcttatacgttagcggccgacgctaatctgcccccggctttaagccgcaaggaaaaagtgctgatgtgcgaaggggagtgttactgcctgacgaaattcaataacggagggcttagaaaggctgcaaatatcatgaactgcaaacgcatcgaatcagcagaaaacctgcattgttttgacacagaagggattacgcatcatgcaactgtgcctttagaagacggggacagaagattcggattgttaaatgtagcggcggccggaaaaaccatgtttgatgaggaagagctgcatttactcgagtctgtcgcctttcagatcggaacggcaatccagcgtatgaggctttctgaatatcaacaaaaaaatgctcttttaatggagcgtaaccgcctcgctcaggagcttcacgattcagtcaatcaaatgctgttttccgtcagtttaactgccaaagctgcgaagacactaacaaaagatgagaatttacagcagatgattgaattcatccaaaacctatcacaggacgcgctcgcagaaatgaaagcgttaatttggcagcttcgccccggaggattggaaaaagggctggctgaagccattaaaagctatggtgcactcattggattgaagatcatttttacacaaaaaggctgtcctgttctgactgatgagcatgagcatatgctatggcgtgtcgtacaggaagctttaaataactgcaaaaagcatgccggaacggatacggcgtatgttagtctgactgcttctttgtgccatgcggagctggatatcatcgatcatggggcaggatttcgctatgaagcgcataccggtctgccttcacttggcatcaagggtatgaaagaacgagcggaaaaagccggagctaagttttggattgagtcagcgcttggaactggaacaaagctgtccatcaggcttccgctaacaagccgaaaaggaggggcggtatgaaaattgtcattgctgatgatcatcatgttgtcagaaagggtctgcgttttttctttgccacccaggatgatattgaagttgtcggagaagctgcaactggaatagaagctctccgtgtcatcgaagagacaaagccggatcttgtgctaatggatctgtctatgcccgagatggacggcattcaagccattaaaaaagcaatacagcaatttccggagacgaatatcattgtgctgacgagctactctgatcaggagcacgtcatccccgcgcttcaggcaggcgcgaaggcgtatcaattaaaggatacggagcccgaggaattggtgaaaacactaagacaagtgcatgctggcgaatacaagctttctacagctattatgtcccatgtgctgacacatatgaaaaatcagcacgacccggaaaaagaaaaatactatcaattaacaagaagggaaaaagacgttctgactgaaatagcgaacgggaaaagcaataaagaaatcgcagcatccttgtttatttcagaaaaaacagtaaaaacccatgtatcgaatcttttagcaaaacttgaagtggccgatcgcacgcaagcagcgcttttcgcagtgaaatataacctgaatggagagatcttaaaatgaacatgttagtcataaatggcacgcctagaaaacatggcagaacaagaattgcagcttcctatattgcagctctgtatcacacggatttgattgatctaagcgagtttgtattgccggtttttaacggtgaagcggatcaatctgaactgttgaaggtacaggagcttaagcaacgcgttacgaaagcggatgcgattgtattattatcgcctgaatatcacagcggcatgagcggcgctttaaaaaatgccttggattttctaagcagcgaacaattcaaatataagcccgttgcattattggcagtagcgggaggcggaaaaggcggcatcaatgcgctgaacaatatgagaactgtgatgcggggtgtctacgccaatgtcattccgaagcagctggtgcttgatccggtgcatattgatgttgaaaatgctacagtggctgaaaacattaaggaaagcataaaagagcttgtcgaagaactcagcatgttcgcaaaagcaggaaatcccggcgtttaaacgccgggatttgtttatgtgagaagggctatttgatcttcataagtcagctctgtggcatgatcaatataacggagaagggaatacagcatcttttctaaaacggcgtaatcctgttcaaaatgatatgcatgcagaaaatgctcaattcgttttgataacaaatcgtcctctgtacgcaccattaaaattaataaattatcccattgagaacgatgggtgtaataaagcgctttatcgtaatcggcataatccatgaatcgcttctcctttcttgggtgagaagttcatgattagtttatgccgcatcctctgttattgacggggcaaaacttgccgtctgcgtaagtaaaggggtagcaatatgagggagacataaaatcaaaatgcctgaatgaagatatcgcttttggtaaacctatgagggaacatattctgggtacaggagactgaaaaaatgaaatccctgccgtataccatcgcgcttcttttttgcggattgattatcgtgtcaatggctgcaaaaggtcattcaacggacacagacgagtccgttcaaaagtgggaacagcttgcctggagcaaaattcaggatgaatataagggcgcttcattttctgattatgcttatatggggcgtacagaggtgaatgatcagcagacgaaagatgtctttcgggtgacagtcagacagaaagatgacactttttctgttcgggccgaagtctattttcatccggtgacaaatcatatgatcagcatcaacgtctttaggctctaataaaaaactgtacagccgttaaggccgcacagtttctgtttttagaaatatcgttttgcaccgagatagcgctgtttccagtaagagttgttcatattggaaatgacaactccggaatcgttggcatttatgaattccccgttgcctaggtaaattccgacgtgggaagggccggctttatatgttgtaaagaaaacaaaatctccgacagcaggctggctaactgatttcattgtgttccaatatcccgctgccgttaatctagatacggatgtgactttattcagtacatagtaaatgaatccgctgcagtcaaacccggacggtgtcgtgcctccccagcgatacggaaccccaagctgcgctttagcggccgaaatcattgtgttaatcttcgcactcgttgagctggtgttgtttgaagaaccggatgaagacgatgatgaagcttttccggaaatgaccagcttttggccaacctgcaagacatccgtttttaaattgtttttctcacgaatctgctgagctgttactttaaatttttgagcaatcacccacaaggaatcaccgcttttcactgtgtatgtagtcgtcgtgcctgagcttgcatttgacgaagaagacgacgatgatgaagagcctgaagatgctttacctgtcagcttcaatacttgtccaacgtacagcacatctgatttcagattgttgatatttcggatttgctgtacagacaggttatagttgtttgcgattttccaaagtgaatcaccgcttttaacggtatatttagttgttgctgaagtttggttcgatttggatgaagtgtctttagaagacgtatcagagccgcttgattttgttttcaacacctgattcacgtaaatggtgtctgattttaagttgttcaagaccttcaattcagcgatggacatattgactttgtttgcaattttccagagtgaatctccaagctgcaccttatatgttcccgtagaagatgaggaacttgaactcttattagaactgctttttgaactggagcttgaactcttattggaactgctttttgtactggaacttgaagaaacagtaccggacacctttaatttctgcccagcacgaattaaatcgctgcttagtccgtttaattttttcagttcctgcaccgtcattttaaactcatttgcgatcagccaaagtgaatctccgcttttcactgtgtaaacagaacttccgctcttcttggttgttgagcttgaagtagatgaagaagtgctggatttgctgcctggaatagtaagcgtctggccgatcgacagaacagtagtcgaaagatgattggcggatgtgagggccgccacacttgtgttataggtttgggccagtttccataaagaatctccgcttttgaccttaatcgttgctgcttcagctggtgtcactactaaagttgtgccgacaatcgcagatgctgtcagccctgctgctaatttctttttcatcttagctctcctttttcccccaatgattttgcatttgctgtttcttttttatatcggcacatttgtctcatcgttttgcctttttataaaaatagccaaattatcttaacaataagggggaaaaagggcataaaaaagaaggaatcttgatctattccttcatttttaaaagcttcatgatatcttctttgtttttgacgaggtcgcgcagtgtgtatttgtctaaaactgcgaggtaggccaaaagcgcttcattcagcacatgttttaagccgcaaaccggggaaataacacagagattcttattcgcatcaaaacattcaacaatattaaaatcgtcctccgtttttctgacaacctcaccgatgttgatgtcttcaggttccatgcctaatcgtatgccgccgccccgtccgcgtatcgtttctacgtagccgagctggccgagcctgtatatgactttcatgagatgattttttgaaatagaatacgtttcggcaatctgttttatatttgaaagttctccgggacgctctgcagccagaaaaatcaacactcttaatgaataatctgtataattggttaacttcataataagacctcagaataagacattttctatatcttatcataatcgattgaaaaatgaaaaaaaaggaattaaaaaaacatgcacccagctgggtgcatgttttttgcttacatgtcattcggcggattttggttttttcggtttttttcgatttctgtgttttgcattttgcgttcaaatgtagacagataacgtgatgcaaaatccttaccgccaaggccgaaggataaaccgaaagcgagtgcgaagccgctaagaacgatgatgaacgcggaattgacgattgtcgcagcgacaccaagctgatccagggccataaagaaagcaagtgcgataatcgtatatttagcaataggcgctaaagacttgaattcctggccttttatcatgcttgcgagcacttttctcaccaattctcctgcgtaaaggccgagtccgagaatgaatactgcgacaaggacattcggcagatacgcgatgatgccagtggcaatttctacgaggaagtgcagccgaacaatttgaagagcctcagctgtaaagagcagaatgacaatgatttgcgcaatcataccgacaacttgagacaaggacagctttgcaggcgttccggcttccatgcccattttccctaagacagaatcaaagcctgcgcgatggagcagtccggacaccatggatttcacccattttcctgcccagatacctgctaaaacaagcacgatggcaatcatgatgttcggaagcatgtttaaaatcgtattcagcatagagacagccggttttgaaatgccggagacatccagctgatcaagcgctgaaatgaccaccggaatcataatcagcacataagcgattgttccgatgactgctgaaaggcttgtatcttttaagtaaattgataaacccatacgtgccgcgaatctttccgtgccgatgcttgcaaggaaattcgtaatgatatcacgaacaaggcgggcaacaagccagccgattaatacgataagcgccgctgcaaataatttcggcagaaaagcgagcacgctttccatcatatttgtaaaaggacctgaaatgccgctgattttcaaagaagataagacccctggcagaaaaacaagcagcacgagataaaagacaatttgtgaagcggtattgacagcctggtgaatatcttttccttcagacaccaaattccacttgcgcagtttgtcactcgtgttcagcttcatcccgatttttttgacaaggaagctcaaaacagaggctgcagcccatcctaacagcagaatgagtccggctttcagcacgcttgggatcgcggctgcaatcgccgaaagcatactgacaaacggcgatgccactgttgtcaggtgcaaaatgttaaagaataaaataaagacgatgatcagtgcgataaaataaacgaccttgcttatgactttttccgaggaatagcgtgaaggctttttcccagcaaagagcttgtcgtcaatttttgttttgctgagtcctttgtataccgctttttcaatgattttagcaatagcccatccgattaataagacgagtaaagcaatgattacgtttggcagcttactgagataagaagaaagcacgtctgctacattcaattggtatcgctcctttttcgtagtatggtgtgtgtttacccactgatccaataagaaaacagatgaatgtgccgggggaattttttcttgcccgagtgagactatcatcttttgtctggcgggctcatacattatagataagtccaagtaggggggattcggttgaacgcggaggagaagaagggattacagcgggcaattgaggaaattaccgaaattgcaaaaggattcggccttgatttctacccgatgagatatgaaatctgcccggctgaaattatttatacatttggcgcgtacgggatgccgacaagattcagccactggagcttcggcaagcagtttcacaagatgaagctgcactatgatctagggttaagtaagatctatgagctggtcattaactcagatccatgctatgcttttttgctggacagcaactcactgatccaaaataaattgattgtcgcacacgttcttgcccattgcgatttcttcaaaaacaactgccgtttccaaaacacgaagcgcgatatggtggaaagcatggcggcaacagctgaacggataaaacactatgaacaggttcacgggataaaagaagtcgaatcttttttagatgcgatcctttcgattcaggagcatatcgatccgtcgttggtccgaccaaagctccaatggagtgtggatgatgaggaagaggagattgaagaggcagccacgccttacgatgatctatggtctttggatgaaaagaaaccgaaaaaacaagtgaaaaaatcgaaaaaaccgttcccgccgcggcctgaaaaagatatcctgctttttatcgaggagcattcccgggagctggagccatggcagcgtgatatattaacgatgatgagagaggaaatgctttatttctggcctcagctggaaaccaagattatgaatgagggctgggcttcctattggcaccagcgaattatacgtgagcttgatttaacctctgatgaagcgatcgagttcgccaagctgaatgcaggtgtcgttcagccgtccaaaacaggcattaatccttattatttagggctaaaaatatttgaagacattgaaaagaggtacaacaacccgacggaggaaatgaagaaaatgggcgtgcagcctgactccggccgggagaaaatgtttgaggtcagggagattgaatccgatatctctttcatccgcaattatttaaccaaagaattagtcatgcgcgaggatctttatttgtttcaaaaacagggccgagattataaaatcatcgataaacagtggaagtcggtgcgcgaccagctcgtaagcatgcgggtaaatggcggttttccatatttgacagtaaacgacggcgattatatgaaaaataacgagctctatattaagcattggtatgaaggaatagagttagatttgaaatatttggagaaagtgctcccttatttattccagctttggggaagaagcgtgcacattgagtctgtgcttgaggataaggaagtcatgttttcctacgacggaaaaggtgttcaccgcagatatttataaaaaagaggatgcagcgttctgcatcctttttattttccagtttttaaaatcttaaatatgatgtttgcctggtccgtattgttaatcaatccgcggaatttttcttttccggggccgtacgcgtataccggtacttcttcgccggtatgatcggtactcgtccatccgctgttggagcgagtattaaaaatcttgatgatggctttgtaggcccctttgcttttgtcagcctgtgcagctgcttcaacgcttttgatttcttcagatgtgaatttcagattggcatagcgggcgagcacatctttaaccggcttgccttcactgatttttttggccatgaattcaggtgttttcttagcggagagaatcggttctgcgtgccaattcttttccccgtttgcgccaatggtaaagccgccggttgtatggtcagcagttgcaatcacaagtgtatgtttgtcttttttcgcaaattcaatcgcggctttataggcctgttcaaaatctttaacctcgctcatagctcctactgtatcattgtcatgggccgcccagtcaatctggctcccttcgaccatcaagaaaaatccttttttattttggttcaggcgatcaattgctgaaacagtcatttctttgagagacggtgttttgctgtcacggtcgagcgccttagcaagccctccatctgcgaaaagcccgagcacctgctgatctttatttttcttcaatgcttgtttagttgtcacatagctgtagccggcttgtttgaattcctttgtcaagtttctgtccttgcggttaaaataagattttccgccgccaagcaaaacgtctattttatgtttgccttttattttgtcatccatatagctgttggcgatttcgtccatgtttttccgtgattcattgtgggcgccatatgcggctggagtggcgtggttaatttcagacgtggcgacaagccctgttgacttgccttgctgtttggcctcttcaagtactgatttcacttttttcccgtttttatcgacgccaattgcattgttatatgtcttaacgcctgtcgctaatgctgttccggctgctgctgaatctgtaatattatagtcagggtcatccggatgcgtcatcatcatgcctgtcaggttccggtcaaattctgttaacttcgggttattcggtgtgtcaccgttatttttcatggaacggtaggctcttatgtaaggcgtccccatgccatcgcctatcatcacaatgacatttctgatctcagctttgttttgttttttggcgctggccttttctgtttgctgcagctcagctccggcaaagattccagctgtaaggacagaaacagcggcgattggcagaaattttgatttcatattttgaaacaaattcattttttcatgcctcctttaatgtattccgtttatcacgttagggaaattttgttaaatgcggctgctgatcatgtaaacaataagtaaagccttgtaaggaaaatgaaaaaacgcttttcgttatcttgccttatttgatgtaaagcattcatttttcagaaaaatctttacctctctgtctttgcatgatatgtttgtttaaataaaaaaactgcggataaccgcagctctcctcgaatattctttatcactcatttttccggtatgtgagccgaccccgaaagtttttcatttatttcctttatgttgaaaaacatcccataaaacatgacaaaagcactcgttttttgtcacctttgcaacgaaaatgaaatatttaatacccttaaaaacttttttttagaacgaataattaagaaatttgtcacatgaagtcaagactatttctgatgggaatctatccttataatagaaatcaataagattaattaaaaaaagagatacatatatagagagttaacatttggggaggaaaatatgaaaaagcaaatcattacagctacgacagcagttgttttaggatcgacgttatttgcaggagcggcatctgcacaaagcattaaggtgaaaaaaggcgacacgttatgggatctttcaagaaaatacgacacaacgatcagtaaaattaaatcagagaaccaccttcgttcagacattatttatgtgggacaaactttatcgattaacggcaaatctacaagttcaaaaagcagcagttcttcttcctcttcttctacatacaaagtaaagagcggggacagcctttggaaaatttcaaaaaaatacggcatgacaatcaatgaactgaagaagctgaatggcttaaaatcagatttgcttcgtgttggacaagtcctgaaactgaaaggttcaactagttcaagcagctccagctcatcaaaagtgtcatcgtcttcaacttctacttataaagtgaagagcggagacagtctttctaaaattgcgagcaaatacggcactacggttagcaaattaaaaagcttaaacggcttaaaatcagatgtaatctatgtcaaccaagtattgaaggtgaaaggaacaagcacaagcagctcaaaacctgcttcatcttcatcatcttcaagcagcaaaacgtcatctacatcacttaatgtgagcaaactggtttctgatgcaaaagcgttagtcggaacgccatataaatggggcggaacgacaacttcaggctttgactgcagcggattcatttggtacgtactgaataaacaaacaagtgtgggcagaacaagcactgcaggatactggagttctatgaagagcattgccagcccgtctgttggtgatttcgtcttcttcacaacatataaatccggcccttctcacatggggatttacattggaaacaatagtttcattcatgcaggatctgacggcgtacaaatcagcagcctgaacaacagctactggaagcctcgttacctcggtgcgaaaagattctaatttttagagaaaacccgttcattggaacgggtttttttcattagacggagcacaggcgttttggttgctcctaaaaatgaaaatgtgataaaaaatccaagaattttttttctttcttattttcataaagggcaatcgcgtaagcgccagcatagggcagctgtacagactgataaggaattctgatcatctgtttctctgctaactcacgctttactgtagataaaggcagaaatgaaactccgagtccttccttgataaaccgtttcgttatatgtgtttgagtgaccttcattgttctcacaaatggaaatgtcattctgacttgacggagcaagtcgtcccagtaatcaggatgattatgggtcaaaagcaggtattgttcgagcacctctttggcatcaatttctttgtcttctatgaaacgcttatcgggcggggcaacaaggacgacagggtctttgtataagcagtggcagcttaaagaagaagactgtacctttaaacagcttagtccgatatctgcttccccggctttaatcagtgacgcgatttccgctgattcgaaaatcgtaaccgccatttctgtttccgtattcattgctgtgtaccgtttcatgacagaaggaagcacagtatctgcaataagcggagaaaccgcgagctgtaaggtttgagagtagccttgtctcactctgtgaagctctgccatgctgttttcataatcatcaagaagcctgagcgcatacggcaaatacgccctgccttcatcagtcagctggatttgcctgcctttacgctcgaacagcttgcagctgatttctttttctaattgcttgatatgtacggtcacagtaggctgagataagtaaagcgtttccgccgtttttcggaagttctcatattttgcagcggtcacaaaggtgtgaagccatttgaaatccatttctattctccctctgattaatatttttaattaattccctttaaaatattcattattttttaaatattatatttactataataacagaaaaggatagggggaattcaaatggtacattacggattaaagggaattacatgtgtggaaacatccatcagccatattgatggtgaaaaagggcgtctgatttacagaggacatcatgcaaaagacatcgcactgaatcacagctttgaagaagcggcttatttgattttatttggaaaactgccttcaactgaagaattgcaggtatttaaagataagctggctgcggaacggaatcttccggaacatattgagcgcttgattcaatcactgccaaacaacatggacgatatgtcggtgctgagaacggttgtttcagcattgggggaaaatacgtacacattccatccgaaaacagaggaagcaatccggctgattgctatcacgccttccatcattgcatacagaaaaagatggacgcgcggtgaacaagcaattgcaccttcttcccagtacggacatgtcgaaaactactattatatgctcacaggcgaacagccttcagaggcaaaaaagaaagcgcttgaaacctatatgattctggccatggagcacggcatgaacgcatcgactttttcggcacgagtcacgttatcaacagagagtgatttagtgtcagccgtcacggctgctctcggcacgatgaaaggtccgctgcacggaggcgctccttctgcggtgacaaaaatgcttgaagacattggagaaaaggaacatgctgaagcatatctgaaagaaaaactcgaaaaaggagagcgcttgatgggattcggccacagggtgtacaaaacaaaagacccgcgggcagaagctttgagacagaaagcagaagaggtggccggcaatgaccgtgatcttgatcttgcgctgcatgtagaagcagaagcgattcgtttgctagaaatctacaaaccgggacgaaagctgtacacaaatgttgaattttacgcggctgcagtgatgaaggccatcgattttgacgatgaattgtttactccgaccttttcagcaagccgaatggtagggtggtgcgcccatgtactggaacaggcagaaaacaacatgattttccgcccgtcagcgcaatataccggtgccattcccgaggaaattctttcataacatattttggcgtttattcatttctgtcgtgtggtaacgttcagtatcaaccacatgtctaggagtgatgaatggtgaacccaatggacagacaaacagaaggacaagaaccgcagcatcaggacagacagccgggcattgagtcaaaaatgaatccgctgccgctgtcagaggacgaggattatcgaggaagcggaaaactgaaaggaaaagttgcgatcattactggaggcgacagcggaatagggagagcagcagctattgcctttgctaaagagggggctgatatctccattctatacttagacgagcattcggacgcagaggaaacacgtaaacggatcgaaaaggagaatgtccgctgcctgcttatcccgggagatgttggggacgagaaccattgtgaacaagctgtgcagcaaacagtggaccattttggtaaactcgatatcttagtgaacaacgccgctgaacagcatccccaggacagcattctcaatatttcaacagaacagctggaaaaaacctttcgcacaaatattttttccatgtttcatatgacgaagaaagctttgcctcacctgcaagaggggagtgccattattaatacgacatcgattaccgcttatgaaggggatacggcgttaattgattattccagcacaaagggtgcgattgtttcctttacgcgttccatggcgaagtcgcttgcagataaaggcatcagagtgaatgcggtggcgcccggtccgatttggacaccgcttattccggcgacattccctgaggaaaaagtgaaacagcacggcttggataccccaatgggaagaccgggacagccggttgagcatgcaggcgcctatgttctgctggcgtctgacgaatcttcctatatgacagggcagaccattcatgtgaatggcggccgttttatttcaacgtgatcaacgaaaaaccagctctagagctggtttttttgtgtggtaaaaaatttcaaaataaaaaatttgtcgatttttctaacaattttgttttcatttttgcaattttatatataatattgagtaggagaaaggaatgattcgcgaccagtacaaatatagtagaaaaaaagaaaaatgaccattgttactcatgaattcagaaaattcaaataaaatatataaaaatagatgatcgggagttgaaggggaatgaaagggagcgtttttaggaagaaaagcattcaggatttaatcgctgcgacgagcggggaaaaatctttaaaaagagaattaggggcatttgatttaacgttgcttggaatcggcgccattattggcacagggatttttgttctgacgggaacaggcgcagtcacggcaggtcccgggctgacgatttcatttgttgtggcggcgttggcttgtttattcgccgccctgtcttacgcggaatttgcgtcaagtgtgcctgtttcaggttcggtgtatacattcacttatgcgacattgggagagcttatggcctttattatcgggtgggatttaattttagaatacatgctggcggtaagtgcagtgtcggtcggctggtctggttatttccaatcgtttttatcagggctcggcattcatcttccggttgctttaacagcggcaccgggcgcagtgaaaggcacctttaccctgtttaatcttcctgcattcgtcattgtaatggcgatcacatatttgctttatttaggcatcaaagaatcaaaaagagtcaacaatatcatggttatcttgaagatactggttgttctgctgtttatcgcggtggcagccgtttacgtgaagccgcacaactggcagccgtttatgccaatgggctttggcggcgtattcagtgcagcggcgctcgtattctttgcttttatcggatttgacgctgtatcctctgctgcggaagagacgaaaaatcctgcgaaagatctgcctaaaggcattattttctctttactggtctgcacgattttatatgtcaccgtatcagcgatcatgactggggttattccgtttgctcaatttgcgggtgtggatcatccggtttctctagttcttcaaagcgcaggacaaaactgggtggcaggcatcattgatattggcgccgtgttgggaatgacaacagttatgctcgtgatgctttacgggcagacacgcgtcatgtttgccatgtcgcgtgacggacttgtgccgggttcactttctaaagtgcatccaaagcacaaaacaccttatgtagccacttggtttttcggaacgatgtcggcgcttctcggctcacttgttccgctggatgaacttgcaaagctggtgaacatcgggacgctgtcggcatttgtacttatttctgtggcagttatcgttttgagaaagaaacagccggatcttccgagagcctttaaatgcccgggagttccgtttatcccgggcctggcaattctgttctgcctgttcttgattttaaatctgggatgggtgacgattgtccgcttcctagtgtggctgttaatcggcttggtaatctatttcctgtattcaagaaagcattcaaaattaaatcaataaccttttgataaagagagcggccatacaggccgctctcttttctgttcctggcaaatgaatctatagaaatgaagacaaaaataagagataatataggctggaaaggaagtgacgtttattgtctgagcaaaaaccagtccaatgggcttcgaaaatcggtttcgtcatggcagccgccggctcggctatcggcttgggcgcgatttggaagttcccttacgtagcggggaccaatgggggaggagccttttttcttatcttcgtgttatttaccatcctcttaggctatccgcttttggtgggggaatttatttttggaagacggaaccagacgaatgccattgatgcatataaaaaagaagcgccgcgatcagcttggtttcttacagggtggatcggtgtagccgcgtgtttcttagtgctgtcgttttacagtgtaatcgggggatggattttgctgtatatcgtgaaaacagcgtcaggatcactgtccgggctttctcaagcacagtatggcgctctttttgcttctattatccaaaatccggtgcagacgctcgtggctcagcttgtctttatggtacttactgtcatcgttgtcgcaagaggggttcaaaaagggattgaacgggtaagcgcggtgatgatgccgattttgtttttattgtttattctgctcgttcttcggtctcttacgcttaatggtgcaatggaaggcgtaaagtttctgcttgtgcctcatttcggcgatctgactccggaatccatattattcgcgctgggacaggccttctttacgttaacactgggggtttcggttatggtgacctacagctcctatttgccgaaaacacaaaatatccctcgttcggcagcctccattgtcttgatgaatatcattgtgacactcttggcaggtttggctatttttccggcggttttctcattcggttttcagccaaatgaaggaccgacactgctgtttacagtgcttccggccgtttttgaacagcttccgttcggcacgttgttttttatcggttttctcgttgcatttttatttgcagccttaacctcagcattttcgatggttgaaattatcgttgccacaatcggaaaaggggacgaaaagaagagaaaaaaactgtcatggacgagcgggcttttgatctttttggtcggaatcccatgctgcttgtcttatggcgttttgagtgatgtgcacctatttggcaaaacgttttttgatattgccgattttaccgtcagcaatgttttgatgccttcaggcgctctgttaatttctctatttatcccgctgaaaatttcgaaaagcgaactcttggctgaaatgcgaaatggatcaaatgcaggtaaagcattcttttacacgtggttttatttgcttcgttttatcgtgccgcttgccattattatcgtgttcttaaatttaatcggaattttatcattttaaaaaaacaggctccgtttccggggcctgttttttatttaataagatgatatcaacggtgcccatgccgttttcagtttttggatgccgagcctgatgtcctcttctgacaaaccgccataaccgattaagacagaagcaaaaggcgtctgttctttatatgagggagacacgggatagatggttacaccgtggtctgcggctgcttgtattgcttcttcctcacttgctggaaacaaaaggcgcagcaggatgtgaagccccgagttcttaccgagaatctcaacggtgtttcccagttcagagcggatggcttctaacaggacagcgtgtttttttcggtataagcttctcattctatttatgtgtttttgccactctccggtttcgatgaagtctgccagtgccaattgtgagtgggcagaaacggtctgcttcattaactgagcattgtttttgatcggttccatgagttcatggggcacaatcatgaagctgagccgcaaggaaggcagaagtgactttgaaaaagtgcccagatatatgactctgccattcggatcaagactctgtaaagacggaatgggatggccgctgtagcgaaattctccatcgtaatcatcttctataatgaatgaatttgtttctgccgcccatgccagcagctcctgtctgcgggtaatcgtcataatggtcccaatcggaaactgatgcgaaggagtcgtatacatgagataaggattctgacggtagagctcatccggcaggacgccttctgcatcagaacaaatcggagtgacatccatgtgatttgcttcaaacatccttcttgaacggtgaaagcccggttcttcaaagccgatttttgtacctggctttagcgaaaggcaaagaatttgcagaagcacggtggttcctgcgccgatgataatctggccgggttcacaatttactccccgagacagcctgacgaatcgggcaatcatgtgcctgagttcgtattctccttgagggtcgccagaggtgtgaaacgatccggaatagcgatcaagactttttactatgctttttctccatgcgttaaagggaaagagggtcgggtcaacgctgccctgatggaagtcaatagcaggtgcgttcttttcatgtaatcccggctgtacagactgctgaaaatggtcaggagctgtcgggaatcctggttctacttccgccgcgaaccagccgatttttggcttgcttttgacatagccctcagcagttaattgctcataagctcgttctatagttgccgtgctgacatcgagcaagctggagagcctgcgttttgacggaagtcttgttccctttgtgattcgcgcatgtgaaatttctagtttaaaaaaggtataaagctgctcatacagcggtgttttgctctttttatcaagaaacggcgtgatatccatctcgtgtctcctttttatctggcatggttattttttctgatattggctatttggcaaatgccatttattagctatgatcattgtaacgaaaggaaaggggattgagaagatgatccatatgaaacaattaacctcgaaagaagaatgggctgagtcgtatccgattatgagtgaattgagaacagaactggatatagagacgtatttacaaaggcttgaagcctgtgtgcagaaagaatcgtatatgctgtttgccttatatgaaaatacagcaatcagagcgctgtgcggggctctgccgagagtttccattcataaaggagagcacttgtggattgcggatcttgttacaacggcaccttgccgatcaaagggatacggcaaaatgcttttggattatgcctcagactgggcgagaaaagccggacttggttttgtcagtctttcatctggccttcagcgtaaagacgcacatcgattttatacagataaaatgggttttactatagaaagttatttgttccgaaaaccggtataacgaaaaaagacgcctgaaaaggcgtcttttttaaaagccaaactgtaaattcgtatctacagatacaatggtatacacacaaataatcacaaagagattaaggatgacgccgagcaggccggggcctgtgcgccctctcttgatgaagagttcaacaacgccgaacggaacggcagccatggcgaatggaagcatttgataggaataaaacgtgacattgctgataatggccaaattcagcaacagcagggacagaaccgctgtcccgacagagatccagccgaatacattgtgttctttaaaaattcttaccagttccataattccacctcgccgacattcgctgattttacagatttatttttcagcatgcgctggatttccttggttggccctgtaacgaccgaaccgtatacattgacaccgtttttctctacataatctaatcggttatctacattcaggtctttccgttttgaaatgacctgagcccatttttcgtgtttggacatgaattttagggcgttgataaactgatcgccattcgacttgccttttgtattaagggcggccaagaactttgaatcctttccaggatagccaagaggttctgtggaagctgtcttatttgtgtttttctctgtttcgattgcgttccacaaaaagctcacatcatagcctttgaatttgttatacacgtcttttgtcggatatgcacggtcatatgaaaggtagacctctgataccgttccttcaggcaatgtgcttaacgttttttctgcttttgcggtcgtttgttcagacttgtttgaaggatgtgtaaagtaatgtccggttttattcacttctaagtcatagtagtttactgccggcgcttttactttgttataaaacatttcaacccgttcattccctacggcagccgtcttcgtgccaatctgcttttgcagcgggaattccgtattcattccaaatagcttcacttggcttttcagtccggaagtatcaacaagaacattcggcatggtcagggctacagtgactgcggcagtttccataaactcattgccggtgctgtgtttcccacccattccgtaatagaggtagcttcccagcgtacaaagcggcaaaatcatcaatgtcgaaatgacggcaagcacagaaattcgcaaataagacttgcgtttgccgtaggctaaaatcgctttttgtttttcaggactgatgctgagatcccaatcgttatcgtcctctagttcgctgtcaatcagttcctgatatacttcgagcttctcaagttcttcctcaaatgcagtcatttcctggtcgctcatttccccatttttatattgatcaaaacgctttttaaattcttcattcatcattaacacctctattataaagtgctttcagccgctgtctggcacgaaataaaacacttttaaaattcgcctctgaaatattcataatatgggatgcttctttgtagtttaactcttttaaataatatagcgttaaggcctcccgataattatcggggagctcggacatataaccagtcagcacttcctttatctctacctgatgggcaggactttgaacagcattttgaaagaggcttccgattaagtcatcagaaatggttacttctttcttatgctttctgacgtaatcaatgaaggcgtttcgcgccacttgaaaaagccagggctttactttgctgtgatcataggagtgaatgtgtatgtatgcccgcataaaggtttcctgcagtaagtcttcagcaagatgcttgtcttttgtcatggagagcaggaacctgtaaacatcattcatgtacatttggtaaatttcatcgatcgtcactgccttttctcccctctatgttatacacgcataagaaaggtttaaagttgcacattacatgcaaacggcttttttatacctaatcaaacaccattactatatagtacccaaaaatggccgcaaaagatagtgcggagaaaggtttaacattttttccagaggggaaaagatagtgaaaaagtgaaggagtggcacaatggaatataccagtatagcagatacaggaatagaagcctccagaatcggcctcggcacatgggccattggcggaacgatgtggggaggcactgatgaaaaaacatcaattgaaacaatccgcgccgctcttgatcaggggattacactgattgacaccgcgccggcttacggcttcgggcagtccgaggaaatcgtcggaaaggcaatcaaagagtacggcaaaagagaccaggtgattctcgcaacgaaaacggctctggactggaagaacaaccagctgttccgccatgcgaacagagcgagaattgtagaggaagttgagaattctttgaagcggcttcaaacagactatattgatctttatcaggtgcattggcccgatccgcttgtgccaattgaagaaacggctgaagtcatgaaggaattatatgatgcgggaaaaatccgggcgattggcgtcagcaatttttcaattgagcaaatggatacatttcgcgccgtcgcacctctccatacgattcagcctccatataatctgtttgaaagagagatggaagagagtgttcttccttatgcgaaagataacaagataacaacattattatacggcagtttatgcagagggctgttaacaggcaaaatgaccgaagaatatacatttgagggcgatgatctgcgtaatcacgatccgaaattccagaagccccgctttaaagagtatctttctgctgtcaatcaattggataagctggcgaagacacgttatggaaaatcagtgattcacttggctgtcagatggatcttagatcagccgggagcggatatcgctctttggggagcaagaaagcctgggcagcttgaggccctatctgagattacaggctggacgctgaacagtgaagatcagaaagatatcaatactatattggaaaatacgatatcagaccctgtcggaccggagtttatggccccgccgaccagagaggaaatataacaaaagctgagggcgaatcctcagctttttggcgttttaacgggagaaatcttaaaaattagtaccaggtaataaaaaatgttgttataatagaagatagaaagaatcattgattacgacaaaggaagtgcgatatgtataagttttgtgcaaatgctttaaaagttattctttctcttcgcggaggagtgaaggtgtataacaaagaaaaccttccggccgattcaggttttgtcatcgcgtgtacacattccggctgggttgatgtgattacactcggagtcgggattcttccttatcaaatacactacatggcgaaaaaagagctttttcaaaataaatggatcggttcgtttctgaagaaaattcatgcctttccggtagatcgggaaaatcccgggccaagcagtattaaaacgccgattaagctgctgaaagaaggagagatcgtcggtatcttcccaagcggaacaagaacctctgaggatgtgcctttgaaaagaggtgcggtgacgattgcgcaaatggggaaagcgccgcttgtccccgctgcatatcagggcccttcaagcggaaaagaattattcaaaaaaggaaaaatgaagctgattatcggtgagcctcttcaccaggctgattttgcccacctgccttcaaaggaaagacttgcagcaatgacagaggctttgaatcagcggattaaagaactagagaataaacttgatcagctataaggcgttctgagagattgccctgaaactgtgaaaataagaaaagcaccttatacaaggtgcttttcttattatgcttcctgctggttagctgtctccagaagttcttcttcttgaagctttttcacttcaatatatgcgacgtggtggccgtcaatttcattaatgatgaattcgcagccctcttcgatgatggaatcatctttttcaacatcgtatttttgagtaaggaaccagccgccgattgtatcgacttcttcgttctctaaatgaatgcctagcaggtcgtttacttggtcaattaacacttttccgtcaagaatataatggccttcgccgattttgcggatttcgctaatttcatcaatatcaaattcgtcgcggatttcaccgacaatttcctcaatgatgtcctcaaccgtcacaagcccggcagtaccgccgtattcatcagacaatatggccatgtggaccctctctttttgcattttgacaagcaggtcttggattggcgcagattcaatgacatgaatgatcgggttgacgaattgagaaatggtggaatcaacagatacctcaccgctgatgcaggcggtcagcacttctttaatgttaataaccccgataatgttatctttatcgccctcttccacagggtagcgggtatatttttcaatctgaatgatgtccatcatttcagaaatcttgatatcatgcggaaggctgacaatttcagtccgcggaatcataatttctttcgcgagcctgtcgtcaaattcaaagattttattcacatatttaaactctgattggttgatttcaccgcttttatagctttcagacaaaatgattcgcagctcttcttctgagtgtgccagttcgttttctgaaacggtctccaggccaaatgctttggtcaataaccgtgcggaattgttcaaaagccaaatgaatgggaacgcgatgcggtaaaaccaaatcagcggtttcgcaaacagcatagacactgcttccgccttttggatagcgactgttttaggtgcaagttctccgacaacaacgtgtaagaacgtgataatggcatacgcaaaaataaacgatatgacatgtgaaagggaacctggaacattcatttggacgaaaagcgggtgaagcagcctttcgatcgttgattcacctaaaacccctaatccgatggaagtcaatgtaattccgagctgacacgcagataaatattcatcaagatgcgtggtcactttttttacggctattgctgctttatttccttccgcgatcagctgatcgatccgtgagcctctgattctgataatggcaaactcagatgccacgaaaaatgccgtcagggcgattaaaacagcaactaaaatcaaattcactatgtccaattagaaccttcactctagcaatgagaatgaaggtaacacctcctgttagataaaatggttttaacttaacagcagcataaatgattggaacacggcgagcttttcaggcgggagtttgcttttcagcttgtcacgatcctcgggcttcagccgttcaaaccgatgcaagattccggagatgttttgattcatatgatcaatttctaatgccagatttccaatttcatcatcaagtttagctgaagagggaaactggttctccagtcgatctttaatatcggacagggccaatcgctgcttcttgcaatctacaataaatataagtcttttgagtgcattttcgtcgtagtaacggtaatttgaacaggatctggccggcgtaagcagaccaagattcgtataataatcaactgtccgtttcgttactccggcgagtgccgctagttcactgatgcgataagtctcagccccatctatatccctcccaaccatcacgttatagttatgagaatagtttaatatatgaatggtgtcttgcacaagtttattgttttttttagaccggaattggaagttgtggaattcatcatctgattgaagtaacataggaagatagaattttcaaacttttatatacggaagggacagatgaaattggctgggttatcccgggaagttgaagaaaacttaaataaaggatcatggattcgcaagctgtttgatgaaggtgcaaggctgaagaaggagttcggggaagaccaggtatttgatttttcactcggcaacccgattattgaaccgcctgaagcttttaagagagcgttaatagaggaagctgaaaaaggcagccacggatacatacaaaaccaagggcttcctgcagcgagagaaaaagtcgcgcaatttttggggtcgcgttttgaagctgatttctcagcggagcgtatcgtcatgacggtgggcgcggggggcgctttgaatgttgcgttaaaaagcatcgtaaaccctggggaagaggtcattattctcgcaccttattttgccgaatataagttgtatattgagaactacgggggaaaagccgtcagctgcccgttgacaagccggtttgagatcgacattgaagcggtaaggcaatcgatcactccacagacgaaag

SEQ ID NO: 3 - DNA, 1000000 bp, Bacillus subtilis
  source 1..1000000: mol_type = genomic DNA
ggctgatcctcaatacaccgcataaccccacaggcactgttctcagccagaaaaatatagacgatttaggcgctttattaaaagaaatagaagagaagagcggccagacgatttatgtgctgtttgatgaaccgtacagtcaattaatctatgatgaagagctggcaaatccgtttcaatcgtaccatcgtgtgatattggccagctcattcagtaaagatctcggcatagccggggagcggctcgggtatatcggattggacagccgaatgccggatgcggaccttttgatcaacgcttttgtgtattgtaatcgaacgcttggatttgtgaatgcccctgtcatgatgcagcgggctgtggcacgaatggatgatttaagagtagacgcgagtgtttataaagagcgccgggatttaatggtagacattttaaaagaagccggttttgaatttgaaatgccaaagggaggtttctttgtttttccaaaatcgccgattgaagatgaagttgcattttgcgtgcatgccgcccaaaaatacaaattattaattgtgccgagcagcggttttggaatgagcgggcattttcgattatccttcagtgtgccgatcgagcagattaaaaactcacgggacattttcatttctttatataaagattttgcttaagaaggcaaagaaaagaaaacagttttcaaggctgttttctttttatatccacaaaatccttcctcttccaatccagacaggcgaagaattgacaagcaggcatgcagttaagtctttcttcatgataaaagtctaaaaattaaaaatcatttttggaatgagttgtgttacaataaaatatacaatttataatcaaactttgacttttggaggtggtaagatggggccctctgcttaggcaacaatacaccgcgtacctcaatgttaaggaaaaatgattatatcaggaggtgactccttatcctttgttgagaggatagggttaaatggacgatattgacagtctgattttaattggcgtgctcattgctttaaccgcgtttttcgttgcaagcgagtttgcgattgttagagtaaggagatccagaatagatcagcttatcacagaaggaaacaaacgggcgatactcgcaaggcgtgtcattacagatttggatgaatatttatccgcatcccagctaggcattacattgacatcaatcgggcttggcgtactgggtgagccggcctttgaacggctgctgcatccactgtttgaaccgctcggcttgccggactcggtttcacatgcagtctcttttgcagtcgcgtacggcttgatcacgttcctgcacgttgttgtaggtgaacttgccccgaaaacggtcgcgattcaaaaggcagaacagctgactttactgatagcgggccctttgcgtttattctatttgctcctgtttccgtttatttggatcctcaatggatcggcgcggcttttatgcgggatgttcggtttgaagcctgcgtcagaacatgatggttcccattctgaggaagaactcaggatgctgttatctgagagtttaaaaaacggagagattaatccgtctgaatataaatatgtgaataagatttttgaatttgataatcggatcgccaaagaaattatgataccgcggaaggaaatggctgctgtgtcaactgagatgacgatggccgagatgcttgaagtcatgctgaaggaaaaatacacgcgctggccagtcacagatggagacaaagacagtgtgatcggtttggtcaatacgaagcatttgttttctgatttgctgtttatgacagaagaagaacgaatgaagatgacgatccatccgtatgtgaggccggtcatcgaagtgattgaaacgatcccggttcatgatttgctgattaaaatgcagcgcgagcgcattcatatggcaatattgtcggatgaatacggaggaacctcgggacttgtgacgacagaggatattcttgaggaaattgtcggagagatcagagatgaatttgatgaagatgaacagccgctgatccaaaagcttggcgacggccattatgtgatggatggaaaggttcggatcgatcaggtgaacagccttcttggcgcatcgattcaagaagacgtcgatacgatcggcgggctgatattaaaagaaaacatcgatattgaggctggtgaatccattcgcatcggttcatattcgataaaggtgctgaagatggacggccgattaatcaagcaaatcgatataaaagaagaagccggcaacacaaccgggattacggcgcaccacaagctgctgctgcccgatcctgtgatgctgaacagtgcaaccttgagcgagaaataagctcaaggtttttttacattgtgattgtccagccgcaccaaaatgccaaaagcgatccgcaaagtgtcagggcgatgtacaagatgctttctattacacgtttggccataaggagttgaatagtttcaacgctgaaggtggaaaaggtcgtaaaggcgccaaaaaaccccgtgccgatgataagcgagaccgaagcatttgcaacgtgaagtcctgtaaatattccgagcccgagagctccgagaatattgactgtcagtatgccaatgggcaggctgagacctttggttttggcggttatgacattgccaagccagaagcgaagcattgcgccaagtccgccccctatgaaaatacccgctagtgtcatctttcctgcagcccctttctttgctgaatgcctgctatgcgccgtcccgcaaaaacaccaatcagtgcaaatatgatccctgatatcaatgaggctgccacatataaaagagccaatgagggttgtccttgcaaaagcatcactgtttccttagaaaacgtggacattgttgtgaagcctccgcaaaagccggtgcctaaaaaagccgacagcagaggccgttttgccccgatcagaaaaaatccggtcaaaatgcctaatagaaggctgcctgccgcattttccagccaggttgccgccgggaactgaccggtgtgtatccataagtttaatccgtatcggaggcaggcgccaagcgcgcctccgataaaaaccgcgctatatattttcatgtttgccatcctttatgatgaaatccgggtaatctgtaacgatgccgtccacgcccatggcttgtaattttgccgctgtcttttgattgttgacagtccatgcaaatatgtttaagccatttttatggatggagccgatcatcagacggttaagccgtgtgtgttttatattgacatagtttgcaaaagagcggaaggccttcatctgatttctggacagcatgccaaagttgggccttgtaatgaccgctgtcggaatcgaaggataaagctcgcggaacctttggacggagcggaactgaaaggattgaacaatattattgatagaaaaagaaaattgccctaatagctgtcccacctcttcttcaattccgacttgagacggatggccttttagttcaattaaaaggccgatttttttgtggtagcgcttgagcaccgcttccagggttggaatacgctctccttgaaaagcgggaccgtaccagcttcctgcatcgagtttttgcaattcctccaaggtaaaatccttaacaaagcccgatccgtttgttgttcggtcaaccctgtcatcgtgtatcacaacaatctgcctgtcttttgtaagctggacatccagttcgatcatatctgcattcattttcaccgcaaggtcaaatgcggcaatcgtattttccggagcgtagccggatgctccgcgatgggcaatgatgtacaagctaagtcagctcctcgtatgggcatttctgttattgtatcaaatccatatatgcaccgcgatacaaactggtgaattttttctgccatatcggaatggtccgggctgaggaatgcgtataactaaaaaaagacactcagcgtatcagaacacatttcgtcagaaaattaggtctttcgacatgttcacaacaaaatatgatcctttataatagcaaaaaaggaggcgagatcatgggaaaagggagaatcagagtggaggaaagaattaaagccgaaacggatgctgaaatgcaaaaagcaactctccttgatcagacacaaacgaaaaaaggtaagtgactgtccctattgaatctggctgatagatgaattgagaaatgaccccggcgtttcgccggggttttgtgctgcaaaagacatttaaatgaacatccttacgaatattttagtataataaacaattgattgggatagaggggagacagtcatgccggattatctgcagcagtattttacgcttgataacatcatacaaatcggcatcagcttggcgattttgctggtgtttcttatacttagaaaattattcacaagatatttctttaacctgctttttaatttgacaaaccggccgaaaacagaaatttttaaacaggtggttctggcgtttgataagccggccagatggttttttgttgcccttgggctgtttttagcgatccggtattcaccgtttttagatgagcaaatgccggtcatcagcaaaatataccgctcactgattgtggcgcttttgtgctggggtctttgtaatttgaccgcaacatcgtcgtttatcttccataaggtgaatcagcgcttcgagcttgacatggatgacattctggccccgtttttatccaaattgctccgttttgtgatcattgcgctcagtgtcagtgtgatcgctcaggaattcaattatgatgtaaacggatttgtagcgggccttggtcttggcggactggcttttgcgcttgccgcgaaggataccatcagcaacttcttcggcggtattatcattattactgaaaagccgtttacaattggtgactgggtggagacgtcgacagtaacaggatcagtcgaggatattacctttaggagcacgagattcagaacagcacagggggcgcttgtaacggtgccgaactctacgctgtcgatggaagcgatcacgaactggacaagaatgaccaaacgccagattacgttttccatccatgtgtcctacgctacgccgattgagaaccttgaacgctccattcattctctcagaacaatgctcttagagcatgagggcgttgataatgaaacaatcatggtcaactttgatacgtttgccgacagctactacaatttattttttaacttctatacaaaaacgacggtttgggctgaaaaccttaatattagagaggatatcaactataaaattattgagattttaggtgcagaaggtgtccagtttgcatatcccggccaaatggttgttgtcaagcaaaagcacgaaagtgacccattccaggtgaatctaaataaagaggaaaaggaacgggcttaaaagagagacttcgtctgacagaggcggagtctttttcatggtaaaataagagaaaaaggcggtgttgagttggaaacattcaaaagtattctacatgaagcacagcgaattgttgtgctgaccggagcgggaatgagcacagaatcagggattcccgactttcgttcagcagggggcatttgggcggaagatgcctcaagaatggaagcgatgagccttgattattttttaagtcatccgcgtctgttttggcccaaattcaaagaattgttccagatgaaaatgagcggcagctttgaaccgaatgaaggacacttgcttttagctgagctggagaagcaagggaagcaggtcgatattttcacgcaaaacattgacggtcttcataaaaaagcggggagcaggcatgtatacgaactgcatggttctatccagacagcagcttgtccggcatgcggcgcccgatatgatcttccccatttgctggagcgggaggtgccggagtgcacggcggccggaaacaatggggacatttgcggaacggtattaaaaaccgatgttgttctctttggcgacgccgtcatgcactttgacaccctttatgaaaagctggatcaagcagatcttttattggttatcggcacgtctctcgaagtggctccggctagatttgtgcctgaggatgcaagtctgattcccggcatgaagaaagtcatcataaaccttgaaccaacgtattgcgacagcttgtttgacatggtcatccatcaaaaaatcggtgagtttgcccgaagtttgggcataaaaaagtgagccgccttatgcgcctcacttttttattcatgaacaggaaccattgtgtcctctaacactccgaaggaatagcctttttcttttaatttattgattagtaccggcagcgcgtttacggtagcgggaagatcatgcatgagaatcacattcgggcggcctgaagagctgtgttccatattttcaagctgctctaacacggccgtcacatactgtgaatttcggtatttccagtccatgctgtcaatcgtccaatcccagtacacaaaaccgtctttctcaagattgcggatttgtgagggggttagtgacggtttgcttccgtagggcgttctgacaagagcggttttatatcctgtaatgtcctgcagtgtgtcacgcgcctcctgcatttcttttagcggagatgtcggtgtttgatagaacaatctgttattgtgggtaacgccatgtaaaccgagtgcgtggccttccttttctgctcttttcacagcctgcttgaattcgttcatccgcggtgacagcataaaaaacgtcgcttttacatcagcgcttttcagtacatcgagcaagcgggttgtaacggctgaagggccgtcgtcgaaggttaagtaaaccgttttatctcccatgttctgctttgtctgcagatgttttatcagcagatcgggggagtcgtttttcagcttaaggctttctttctcatctcgaagctggccgtttgttgtgacagtgacttcctttgctttcgttgaactgttggaataacccaaaatcaccataagcaaaagcagcacacataaaactgctaaacttgcaaatttaaaagcaagcgaaactgcagaaggagaagcctctcctctcgtttgtcgcataacaatctctccattggcataaaatctctacataatgctgtacagcaggcagcttatgaagatgccttatgtttacaacctatgtattaccagtcaagtatacaggaataaaactggaaagcacatagaaaatttgtcgaaatgtcagattttaaggaaaaaataaactcctttccgctatagatctcttgatctttctgtttttcggcttgtccaatatggtagaattagtgataatgacagcttgaatgacatcagggacatctcgaaaagggagggcttttatgaaggttttagtcaatggccggctgattgggcgcagtgaagcatcaatcgatttggaagatcgcggttatcagtttggtgacggcatctatgaagtgatcagggtgtacaaaggagtattgttcggcttacgtgagcatgcagagcgttttttcagaagtgctgctgaaatcggaatttcactgccattcagtatagaagatctcgagtgggacctgcaaaagcttgtacaggaaaatgcggtcagtgagggtgcggtatacattcagacaacaagaggtgtggccccgcgaaaacaccagtatgaagccggcctcgagccgcagactactgcttatacgtttacggtgaaaaaaccggagcaagagcaggcatacggagtggcggccattacagatgaggatcttcgctggttaagatgtgatatcaaaagtctgaatttactgtataatgtcatgacgaagcaaagggcctatgaagcgggagcatttgaagccattttacttagggacggcgttgttacggagggtacatcctctaacgtttatgcggttatcaacggcacggtgcgaacacatccggctaatcggctcattctcaatggaattacacggatgaatattttaggactgattgagaagaatgggatcaaactggatgagactcctgtcagtgaagaagagttgaaacaggcggaagagatctttatttcgtcaacgacggcagaaattattccggttgtgacgctcgatggacaatcggtcggaagcgggaaaccgggaccggtgaccaaacagcttcaggctgcttttcaagaaagcattcaacaggctgctagcatttcataaatgaacgaagaaaagagcccgctttatacagcggagctctttttattttttaacaaatccaatcaaaatggagatcatcggcgatatatagaggaagaacgtaaacgggatgtagtctatgactggaacaccaagtgcgctcgccataaatgcgccgctgacgccccaaggaatcaatgggttaattaatgttccgccgtcctctaatgaccttgtcagaaatttgcgctggatgttttgtttgtcatataaggatttaaatgattgtcctggtattaatatcgataaatactgttcaccggttgccaagttgacgccgatgcttgagcagacagttgctgcaactagacggccttttgagcggatgcctttcatgatgccttccaatagtgcagaaatcaatccgattttctccatcaatccgccgagtgcaaaagcaatcataatgagagagacagagcccatcatggattgcaatccgcctctgttgataattttagcggctgcctcattgtcagtttcgaaagttgtgccattttgcaaagctgtcataaacgcctgcaggctgctgtcgggtacaaaaatagcagtcaaaattcccgaggaaataattccggcagtcagaacggggattactgatacccgtttcattgccagcaaaacgactaagagcggagaaagaagggcccacggtgtcacgtttgcaacatcttttattccggttatgacctgctgaatattatcggttgaagcagcgtccgctgacactgatgaaccgagaaagtaaaacagaacgacagtgatgagcaaagctggaatggttgtgcccatcatatggcgaatgtgttcaaagatcggtatttcgcctattccggctgcaaagttggttgtgtccgacatcggcgacattttatccccaaaacaagcgccgcatatgactgcgcctgctgtccattcaagcggaacgccggccgcgctcgctacgccgatcagcgctaccccgattgtgcttacagttgtcaggcttgagccaacaagtgtgctgatgatcatacatgaaaacaaagcagtcaacagaaggtggcttggttcaataaaggatagggcataaactgtcacagtcggtattgcgccgctgtacatccaggcgccgattaagatgccgatcagcgctagaacaataatcggctgtacgccgtttttgatcccgtctacaatccctttttcaatactcttccaggaaaatccaaaccataaagctgctgctgaaagcatgacaacacttaaaaacagcgggatatgaggttctacatgaagcaagaataagcaagaaataataatgcataacatgaatataaataaaccgacggctaacggaaacgtcagctttttttgagaatccaaaataacaccccatatttatctttaatgcttttgtgcttttgggcacgaaagcattataacagaaaaaaacgaaaatctatgttttttcacaattatgaatataaaagaagtgagcacagggcgtgctcactttacaatcaggacgggtatatccgatttcgctgaaagcttttcacttacacttccgaatattagctttttcagcctgttttggtctctgcttccggttacgatcatatcggcagaaatgcggtttgcatgctcgataattgattcagccggatcgccttctaatatatcgatatctccatctgcctgctgttcattcagcatcattcttgcttcggcgatgacttcttccgtacggtcttcatagatcattggctcaggtgatgttacacccgatatcagcggatcaggaacacttgtcatgcctccgctgatatagcttgcctcagctgcgggtctgggtgggtcgatgacggtctgattgtctttcatatcatgtgaatgggcgacggtaatagcggcatttaaggttttagcaagatcaatggctgtctgaagcgctttcttactattttcacttccgtcaaacgcaacaatgatacggtcagcatggaacatccttctcaccctttcaaagcgtcttacaacactactacccgaatttgagcacaattaaccttttcctattcaagtaatgattgacaataaaaggttttgtttatatgatgataaaaagatgaaatcagaatggaaggagggtttgctatgccaaggaatttgcgtgtttatcaaacagtttcatattggcgcggcaaaccttttgttctgttttcgtgaacggttttttaggtcggaccgcgcgctgaaaagcgctgtgcgtaacatatcggttaaaaaaggcatggagctgacgcttcatgccttttttatatacaaaatctaaggaaagacaggtgtatgggatgtgaagacaaatacagaggcgagggctgttcatgccaaactggatgaaaaaagctgcaaggaaaaaatagaaggcggctgataaggagatggggatagatgttttcagttttgaaaaagcttggctggttttttaaggcgtactggctgcgctatacgattgcgattgtccttttattagcagtcaatgtcattgaaatgtttccgcctaagctcttggggaacgccatagatgatatgaaaacaggggcatttactgcggaagggctgctgttttatatcggtatcttttttgtgctgacggcggccgtgtatatcatgtcttatttttggatgcatcagctgtttggcggagcgaatctgatggagaaaattcttcgtacgaagctgatggggcatttgctgactatgtcgccgccgttttatgaaaaaaaccgaacaggcgatttaatggcacgagggacaaatgatcttcaggccgtcagtttaacgacaggatttggcatcttgacgttagtcgattctacgatgtttatgatgacgatctttttgacaatggggtttttgatcagctggaagctgacctttgccgccattatcccgcttccagtcatggcgattgcaatcagtctatatggaagtaaaattcatgagcggtttactgaggcccaaaacgcgttcggggcgctgaatgacagagtgctggaatctgtttcaggcgtgcgggtgattcgcgcgtatgttcaggaaacaaacgatgttcgccggtttaatgaaatgaccgctgatgtttatcagaaaaatatgaaagtggcttttattgattcactgtttgagccgacggtgaaactgcttgtcggcgcaagctatctgattgggctcggctacggagcgtttcttgtattccggaacgagctgacgcttggagagttagtgtcctttaacgtttatctcggcatgatgatttggccgatgtttgcaatcggtgaactcattaacgtgatgcagcgcggcaatgcgtcattagaccgggtaaatgaaactctttcttatgaatcggatgtgacagatccaaaacagcccgctgatcttaaagagcctggagatatcgttttcagtcatgtcagctttacatatccaagctcaacaagtgacaatcttcaggatatttcatttacggtgcgaaaagggcagactgtcgggattgcaggtaaaaccgggagcggaaaaacgacaattattaagcagcttttgcgccagtatcctccaggtgaagggagcattacattttcaggcgtaccgattcagcaaatccctcttgaccgtctccgcggatggatcggatatgtgccgcaggatcatttactgttttcacggactgtaaaagaaaatattttatacggaaaacaggatgcaactgataaagaggttcagcaagccattgccgaagcacattttgaaaaagatttgcacatgcttccgtccggtctggagacaatggtcggtgaaaaaggcgtggcactgtcaggcgggcagaaacaaagaatttcgattgcgagagcactcatggcgaatccggaaatcttgatcctggatgattcgctttccgctgtagatgccaaaacagaggctgcaattatcaagaacatcagagaaaaccgcaaaggaaaaacgacatttattttgacgcaccgattatccgcggtagagcacgctgacctgatccttgtgatggacggcggcgtcattgctgagagtggcacgcatcaagaactgctggccaataatgggtggtaccgggaacaatatgaaagacagcagctgttcactgcggaagaagggggagcaggggcatgaaaataggaaaaacgttatggagatatgcacttctttatcgaaaattgctgatcacagccgtccttttgctagctgttgccgtcggtgcagaactgactgggccctttattggcaaaaaaatgatagacgaccatatcctcggcattgagaaaacatggtatgaagctgcggaaaaagataaaaatgccgttcagtttcacggcgtctcatatgtcagagaggaccgattgcaggagcctgtttcaaaagcaaaagaagcgcatatttatcaagtgggaatggcattctattttgttaatcaggctgtcagcttcgacgggaatagaacggtttctgacgggaagctgacgatcacaaacggagacaagagccgggcatatgctgccgaaaagctgactaagcaggaacttttccagttctatcagccggaaataaagggaatggtgtttctgatctgcctgtatgggggcttgcttgtgttttcggtattctttcaatacggacagcattatctgctgcagatgagcgccaatcggattattcaaaagatgaggcaggacgtgttttcgcacatacagaaaatgccgattcgctattttgacaaccttccggccggaaaagtcgttgcgcggattaccaatgatacggaggctatcagggatttatatgtcacagtgctttcaacatttgtaacaagcggaatctatatgttcgggatattcacggctttgtttctgcttgatgtgaagcttgcgtttgtatgtctggcaattgtgccgattatctggctgtggtcagtcatataccggagatatgcgtcatattacaaccaaaaaatccgctcgatcaacagtgacattaacgcaaaaatgaatgagtcaattcaaggcatgaccattattcaggctttccgccatcaaaaggaaacaatgagagaatttgaggaattaaatgaatcacatttttatttccaaaacaggatgctgaatttaaactccttaatgtcccataatttggtcaatgtcatccgcaatcttgcgttcgtctgtctgatctggcattttggcggtgcgagcctgaatgcggcggggattgtttctatcggtgtgctgtacgcgtttgtcgattatttgaaccggttatttcagccgatcacaggcatcgtcaatcagttttcaaagctggagcttgcaagggtctccgccgggcgtgtttttgaactgcttgaagaaaagaatacggaagaagcgggtgaaccggcgaaggagcgcgcgctggggcgggttgaatttcgtgatgtgtcatttgcgtatcaagaaggtgaagaggtattaaagcatatttcctttactgcgcaaaaaggcgaaaccgtagcgctcgtcggccataccggatcaggaaaaagctcgattttgaatcttctgtttcgtttttatgatgcgcaaaaaggtgatgtcttaattgatggaaaaagcatttacaacatgtcaagacaggaactcagatcccatatgggtattgtgcttcaggacccgtacttattctcgggcacaatcggatctaacgtaagtctggatgacgaaagaatgactgaagaagaaataaaaaatgcactgcggcaagtcggtgctgagcctcttcttaagaagcttccgaagggcattaatgagcccgtgattgaaaaaggcagcacgctatcctctggagagcggcagttaatttctttcgctagagctttggcgtttgatcccgcgatcttgattttagatgaggcaacggcgcatattgatacagagacagaggccgtgatccagaaggcgcttgatgtcgtcaaacaaggacgcaccaccttcgtcatcgctcaccggctttcaacaatcagaaatgctgatcagattttggttcttgataaaggagaaattgttgagagagggaaccacgaggaactgatggcattagaaggccaatattatcaaatgtatgaactgcaaaagggacagaaacattccattgcataacgctcaaaaacccaaaacaatcgtgttttgggtttttggtttatgtagtcaataagccagtccgacacggtttccgacatactcacctgtaacgagctcacgatataaaaagtccgcagtatcgccgaccgaaatgcttgtgccgccctcaggcaaaacgttacgctccgtacgataaacgccggttgctgttccgtccgggaggtaagtggggcagatgattgtccagtctaatgatgattctttaagcatttcgtatacttttgcatgctccttggctgcgcgggtctgctttcgtttcgattcatttgtttcaaaccggtattttcccggttcatatcgggaatctaggatccctgcggtgccgatcgtaataagccgtttgatatgctgttcctccataacggagagaatgtgtgccatagcagttgacaaggtatcatcaccatctgtgcctagacagctgatcacgatttcagcattctccattatttttttcacatcttctaagcggcgggcgttccccatgacggttctgtcttttgaaaggggaagatcagcatgttgagatctgatcagagcgaaaatatcaaatctttcatctgctgcagcttgtgttaaaaaggcttgtccgacgcggccgctggctcctaataaagcgattttcattaaaaaacctcctcgcctttcattataaaaggatgttctcagtttgaacagcgcgggaaagaatacctgtacaaataaacagaacgatgggaaacatattcatgaatcatggatacacttacgaattgaaccagctcccaattcacaatggtgatgaatgacaccccgattccctccctttttttctaggatatgtggagcaggaaaaaagggtgacaaaataaagagagcgcggaaaccgcgccctctatagccatatattgaattgttattgaactctgccgcccatttgctgctgagcgaaagatactaaacgttttgtgatttctcctccgacagaaccgttagcgcgagaagttgtgtccgctccaaggttaacgccgaattcagaagcgatttcaagtttcatttgatcgatagcctgagctgcgccaggaactagtaagtcatttgaagagttttggttagccatgtgtaaaatctcctttttatttagtatggttgggttaactggagttgcaccaatctgtgaacccttctcgggtgtcactgccgcctcggcgtaacccaatgctttgccggcttgttactacgtattatgttaaaatggccggaaaatcatgcggagaattgtgtggtaaatcttgagaaataaaaaaagcttagccgtttaggctaagctagtcataaatatgaaaaagcatcagttcatgtatctcgtttgtaagagcaggctcgtcagcgcgggcgggaaacaagtctccccattcaatctcaccgctcttatgatagatgccttcataatgggtccctttataataaaatgaaattttccatccgggcagcttttcttttgggaacaaaggtttccagctgaaatgagaaatcattacggccacgctccttacatttggtatcaattgacctaaataaaaacggcttatgttcattgtatcattgtttcagaacatcattgaagaggcctaaatatgcagtttgtcccagctttggataaagataagcccgctttattaaaaaagcggacaggttacgaaggccacaatgcttccggagatgtgattgccttctcagataaatatgacgcgtattcaaaacttcttcgttttgtaagagaatcaacatgatgcaaatttggatgagaaaaaatgcttcggcccgggcgcgaattcgcttcaaacatccatactttaccgttctgatcaatgccaaaatcgaaaccaatctccccgataaatccctcgatatgatcatgaaggacatggcttgcagtcagtgccgctgcagaaagctttttaatgacctcaactctttcagcgggatcatcgtatacttccgcaagtgtctttacagtgccgccgttagaaagatgtgttgtaatgctgttctttccggaaatttttacggcgattgctgtcactgtccattttccttttctgtttttattggtatggacacggaaatccgctggtttgccttgaaattcgatgagatcaacaccttgctgaatgagaaagtcggacgggttgtgatgtttttgaaattctgcaaggaatgaggcggcatcggaataatcaattgatgtaaaagttttggcgtcattcgtatgctttaccgtcaggccgccatctgttcttgtcagctgataaatgccggtgccgagtgctccatttgccggtttgatatagacttttttgtatgcgccacagagctcatcaatcagctccacagacggtgtcagctcggatctaggcaaaaagggtgccgttctcggatctttttcgagcaattgatgaacgttccatttattgaaaaacgttttattaaaccatgggatctgatattcatcgatcagcctcttttttgtatgttgcaagagaagtgaatcttcaatttttcggttcggcaaacggtcataaacgacgttcggcaatggaacgatttttttctcccagccgttttccctgtaaaggaggccttcaatcgtgccttcctcccaattgatttggtgcgcgccaaaaacgaagcagtagcccccggcttgctcgtgtaacgtgacaagtttagaaaaaaagagggaacgatccttaaatggacgttcaagagatacagtaaaccctgccgtaaagatgccgactaacggcccgatatgcactgtatgatcatgaatcagtatatcagccctgcttcggtggggaagcaaaagctcatgaaacagattttcagagagaagcacggtttgttccagatgccgtctgtaagcaacgtggcatctgacaaccttcgttccgaatgcggcatgcaaaagtccgtctcgcttcagcgaagagggcagaaacagggtattttcactggttttgtctatgccgatcaaaaaccgtttaggattcacgcggaagaactcctttctggctttgctcagaaaacagatattggcagcgctttaggggacaagtgtacagctgttctttttgctcgggagagacacgcaggattgactttctgcctggtttggaattgatatctaaaatccaaattctcccgtccttagcaagacatatatcaagaccgagttcaaacaacggcccatagcgctcgtcaagataatacggaaccgattgggtaatcgaaaacacatcatctagtaagaccacttgctgttttttcggtatatcttcaaaccaggagtcaaatgtcagcgcatcagatccgcctgacaaattggccagcagcccgtgtttgtatccgcgtcttactgcctttccgactgtattccattcacctgcttcgtttttttccataaacaggcgaatatcacaagggtattgttccttatcttgaatgtttaagtaaggctgaagcaaatattgatgctgaagcacttttttgcaccatgttttaaaagaagtctggttggaaaacgtttttgtctgcttatcctttccgatgtgataagtagcagtgatgtttttcttgcccagcttcaaaagaatcacgcctctgcctcccgcgccaaatgccggtttaaggatgcaggctttttctttggataaaaaggagtgaatttgttcgtagcggctcacctttatcgtttcgggaatatagggattgattacagagtgctgctgcaaatcgtgaaggacggtccacttatcgggaagaccccgcccgataaattccgttttcggatattttttgagccactcaacgattggttttgctttttgggaatgtgaatccttgccgtaaaaacagcgatcataaatataatctggaatcgccatttcagtttcgttccatgtgctgctggccgaatgatagaccgatgctttgacacgcaaagtgtcaggtgaaatatcaaatggtgtaaaccggatgaaacgtatgccgaattcgggtgctcttttggccagttctgcggaataatccgcttcatgctggcgggataaggacataaaaccgagtgttatcatggtgagactcccccttttattcaaaagctgccggcgggtgtccgcagctttacactaaatacatgtaagacgaacgcagctgacggtattctactttacagaatacgattctccaccttgccctattccaaaagaacaagctgattttctaagaacaggaatttgtctcctcgtttgctaagtgattgcatgagcctctataatacgtataggtacataatctatatgaaaaaagctgaagcacagatggaggaagatgaataggaatgggtattgcaggaacctttatttttatgatcgtgatcggcgctgccattggagcggtgaccaatcatttagcaattcaaatgctgtttaggccgtataaagcgtactatttgtttgggaaacgagttccttttacgcccgggctgattccaagacggcgagatgaacttgcaaaacaaatgggactgatggtagtcaatcatctcttaacccctgaaggcattaaaaagcggctcgtctctgatgcagccaaaacgcaggctcttcgagtgggggaacagctgattcaaaagctgtcactttctgaagtgacagtaaaagaagcgcttgaaaaagccgggatgaagcgcccagaaaaagctgctgatgcatggatcagcagctggaccgatgataagctgaatgagcttttccgccaatacggggaccaatcgttaaaagagctggtgcctatagaggtgcaggaaaagcttgaggaaaaaattccgatgatttcaggatatatattgtcacggagtgtcagttattttgaaagtgatgaaggaaaaatccgtcttggcaatatgattgatgactttttaaaagagcgcggcatgcttggaagcatggtgcaaatgtttcttggcaattcaagccttgcggatcgcgtgctgccggagctgctgaaattcttgcgcaatgaggaaacaaataaattgctttctgatctcttaaaaaacgaatggggcaagctgagggagtatacgtttaatgaagcagatgaaaaatggaatgcaaaggcgctcattttcagtttgaaacgaagagtgctgcaagcattttcgactgcccctttcttcgacaatacgattggcacgcttaccgtccgctatgaatctgagctgacccagcaaatgctgccggcactgttagacaaattgcttgaagggatttcgtccaaccttgaaagtgtcttaaaacggttgcgtcttgaggaaatcgtcaaggagcaggtggatcagttcccggtggagcgtcttgaagaaatggtgctgtccatttcaaaaaaagaatttaaaatgattacctatttgggggccttctcggcggaattataggcgcgattcaagcattgtttgtcatccttttttaagaagaaatggtttttgattaatgaaaggagctccatagtctgttatagtggagtggtatgtcaaacggcaatgatgaaaggagctatttacaatggctgttaatttttatgatgtagcgtatgatctggaaaatgcattacgcgggagcgaagagttcacccgtttaaaaaacctttacgacgaagttaacgcagatgaatcagcgaagcgcatgttcgaaaacttccgtgatgtacagcttagactccagcaaaaacaaatggcaggagaagagattacacaagaagaagtgacgcaggctcaaaaaacagttgcgcttgtacagcagcacgaaaaaatttctcagctgatggaagcggagcagcgcatgagcatgctgattggtgaattgaacaaaatcattatgaagcctttagaagagctttacggcagtgttgaaggctaataagcaaaatcccttcttggataagaagggattttttattcattcagcaaacttggaaatccaatgaatcttttacctctccattgatgatcactgataatgtatgaattcctttgtaatgctttctggtggttaaatccttaaaggattggtttcttgtgtatgacttcgtttcgttttttcgtatagttgtttctgttattttaaatactttctgatgacgctggcctcttgcttttacaaaatcaattgcgtactcaattcttactttttgatccctgtctgaatgaatatagaaagaaaattcaaggctttcgccaataactatacgtttgggctggcctgttaaatcatgtagttgtatcgaatcagcattttcataaccaaaaagcgctaaggcctgtttatcacccttttttaataaggtccgataggcgtgtttgataatccagtctgtatggggatgtgttccgtaccattgatctgcgacttttctcagtaaatgaggatgcgtttttgatatatcattaaggttgttggccacgctttttcttacatataaggactcgtcctgcatcagcttctcaaggatcggcaatacgggggaagggtccgatttcaaagccggtatcgattttccccatggcaggcggggcctgctgccttcgctcgcaagtcttctcacgtgttcatttttatgctcagaccatgcaagcaattgtgcaaccatcttttcttgatctaacagcaaaaaaggccttacagcaaattctgaggtcgaatattgcgtaaagtattccaatgcctttattgattcttcccaatgcgctaacccgtactgttccacataatctggaaataaaattccgctgagtcctttaaaatgaggggctgtatcccgtaaaattgtgagcgcttcaacgtattgttttggcaaagtttcgtataaagaaactgtcacgcggcgcatccgctcttttaaagtgagttcaggccagtcctccagccgtaatgtatcctcgaatctgtctttgttaaaatcaggataggatgaccttacatgatggatcaactgagatatcagttcttcattatatatttcttttaaatcagccatataaacaccgctttttcgtttattatttatattgtatgggaatgtacgttctggatcaagtgtatagtcctaaaaattaacaactgatcctaccacggatatacaaaagttggttactttttttagttaaaaaaacccttgtcatcggaaaagaaaactgagataataacattgaaagcgcctacacttacctatttcaaatggatacggtcgcatatcatgccgttatatagaggggataagcaacagagagtaagtgttcggagcgcatcattggtcaaacaaggggttcctgatacatgatttttcgtaaatcgaaataacgatattagggagaatggctgcttcgatcgtatcctatcaacaagccatacataaagtctgctgagccaggctttttttgctttaagaaaaggttgttctaaacacagagacagggtcatatcctatacacaagtacagtcatcaaggagggggacatctctgtgtcaaaacaattgcttgccttaaatatagatggagcgctgcttcggtcgaacgggaagattcatcaggcaacgaaagacgcgattgaatatgtaaagaaaaaagggatttacgtcacacttgtgaccaaccgtcattttcgctcagcacagaaaatagcgaaatcgctaaagcttgatgccaagctgatcacccatagcggggcatatatcgctgagaaaattgacgccccgttttttgaaaaaagaatttctgatgatcatacctttaacattgttcaagtgctggagagctatcaatgtaatattcggcttcttcacgaaaagtattccatcggaaacaagaaaaaggtgaattcgaatttattggggaaagcactcattcatccgtctgacccgatcttttatccagtccagttcgttgaatcattaagcgatctcctcatggatgagccggtgagtgcacccgtcatcgaggtgtacacggagcacgacattcagcatgacattacagaaacgattacaaaagccttccctgcagtggatgtgattcgcgtaaacgatgagaagctgaatatcgtcccgaaaggtgtctcgaaggaagcgggtttggccctcgtcgcttcagagctgggcctgagtatggatgatgtcgtggccattgggcatcagtatgacgatctgccgatgatcgaacttgccggtcttggggtagcgatggggaatgccgttccggaaattaagagaaaggcagattgggttacaaggtccaatgacgagcaaggtgtcgcttatatgatgaaggaatatttccgaatgcagcagcgaaaaggatttcttgataagttccacatgaaacgtgtgtaaaaaagccgctcgcaccctgacaggtgcggcggcttttttgccggattgattttagcagtttatttctgtacactaaagaaagttttgaatctgataaattaggtgatgaagttgcaaattaaaatagaaggcatacatgatgaccgcctgcatcggcctctgcaaaatattgcaaatttgttttatgaagagtgcgagcttgcgtatggcggagaggagcccgcagattttgtcatttctttagcgttgtcacaaacggatgagcatgtgacggtttcgggagaagtgaagggaactggcataaaggaacagcatacaaaattcttttctcccggcatgaatgaaaaagaagcttttaagcaagtgaaaaacacaatttcttatgtgtatctcaatcttcttcaggcgcatacgggcattacgcagaagtggggaatcctcacaggaatccggcccacaaagctgcttcataaaaaactgcaaagcggaatgtccaaggagcaagcgcatgctgagttgaaaaaagactatttaattcatgatgaaaaaatcatgctaatgcaggaaattgttgaccgtcagctggcggcagttccggatttgtaccgagtaaaggatgaagtcagcatttatatcggcattccgttctgcccgacaaaatgcgcgtattgcacattccctgcgtacgctatccaaggacaggcgggcagagtcggctcattcctatggggactgcattacgaaatgcagaaaatcggtgaatggctgaaggagcatgatgttaaggttacaaccatttactttggcggcgggacgccgacaagcattacagcggaggagatggatctgctgtatgaagaaatggtccgctccttcccggatgtgaaaaacattcgtgagattacggtggaggccggtcgtcctgacacgattacagaagaaaaactcgccgttttaaacaaatatgacattgatcggatcagcatcaatccgcaatcctacgaaaacgaaacgctaaaggcgatcgggcggcaccatacggttgaagagaccattgagaaatatcatctgtcacgccagcatggcatgaataatatcaacatggacttgattattggtttgcctggggaaggcgtgaaggagttcaggcacagtctttcagaaacagaaaaactgatgccggaatcccttaccgttcatactctttcatttaaacgggcgtcagaaatgacgagaaacaagcataagtacaaagttgccggcagggaagaggtttctcaaatgatggaagacgcggtagcctggacgaaagagcatgggtacgtgccttattatttataccgccagaaaaacattcttggaaaccttgaaaacgtcggatactctttgccgggacaagaaagcatctacaacattatgattatggaagaggtgcagacgattattggcatcggctgcggcgctgctagtaaatttattgatcgggatacagggaaaattacgcattttgcgaatccgaaagatccgaaatcgtacaatgagcgcttcgagcactacacggacgaaaaaatcaaatatttagagcagatttttgaaaaaacgacaaagcagcactgatcacagtgctgctttttttatccctgtttttttgcgggctgaacctcaggcttccatttaaataccttgttaagcaagcggtaaattcgttttgattcctttgtgacaagcggtcccaaaatcgccagaatgaggacatataatgcggcaaacggctttaatgtggccgacagtccgccggctatcccgagattcgcaacgataatcgaaaattctccccgcgatacgatcgtcagcccgatattcgatgaagccttatgagaaagccctgcgcgtcgtcctgccaccattccggcgataaaatttcccagaatggtcaaaatcactgcacccaacgcaagccaaaccgcttcacctagcgaaaacggatcgatactgaggccgaagctgaaaaagaacatcgcaccgaagaagtcgcgaaacggaacaacgaggtgttcaatcctatcggaatgctctgtttctgaaaagaccaaaccgagcagcagcgcgccgattgcttctgctacatgaatcgtctcggaaaacccggcgataaaaaagagcgctgcgaaaatgacgataataaacacttcgtttgagcgaatgtccaacagtttgttcaacagcggcgggagttttcttgctgcgataaaaaacagcagcatataaccgaaggcgatcaaaatggacaagagtgcactccctacggatgtcgcatcacctagtataaggccggaaacaacggacagatatacggcaaggaaaatatcttcaaacatgatgatgccgagaatcaattcggtttccggattggcggttctttttaaatcaacgagcacttttgcgacaatcgcacttgacgagattgtgatgacgcctgcgaggatgaggacttccagaaaggaaaatccggtgataaacccgtaaagcagtccgaggctgaagttaatcaaaatataaatcgtcccgccgaccgcgattgattttcctgatttgattaacttcccgacagagaattcgagtccgagatagaagaggaggaacagtacgcccattcgcccgaaaaactcgatgatttcactgctttgaataaatgttagatcaataatccccattttcggcgcgtgcggtccaacaagcattcccagcacaatcagaaacggaataatcgaaaatttaattttattggcgatcacactggcgattgccacaagcacaagtgcagttccgacttcaaatacaagatggtccatcggggctcacacgccctctccagaaagaaaatcgtgaatcagtttcttcagatgctttctctcacctgagaggacaagggtgtcattttcttcaataatcgaatccgctccgggatttaggagcttttcctggttgtgtttgataatcgcaataacagtgacatcgtaattctggcgaacatcaagctcaccgagtgtgcgtccgatcgatttggcgcctttttcgaccttaaaccattcaataataagatcgctgaaggccatttcgatggactccagagcttgcggtttatagaccatgcccccgagaatagctgcaatttgccttgcttcagaatcatccaatgaaatatttgaaagaagctcatccgggtcccggtcattaaaccggtaaatttcccttcttccgtcatcatgaatgataatcgtcattttttcgtggcttcttgtttcgatttcaaactttttgccgatgcccggcagatcgttttctttaatattcaatgaaaatccctccgaatgtagtgttggcagtatggggtgagttacaaataaaacttgagcaaattatattcggaggtaattagactggtatttgacagggacggcacaagccttttccagcctgtttatcagcggttcgtcaagtggtttgacagagagatgcctgacagactgtgccagcgggctgtactctttgatcagctcagccgggtgaatgctgcccggcgacggcgtttttgccgattgtgtttcctgcggatatgaggacataggcacatagctgtcagtgcttgcttcaaactgggaaggcagaaccacgtccgaagggggaaagtacaccataaataaacttaacagaaaactgatcagcaatttatccatgtcctttcctcccttctcatcaagatatcccttctttttcactatataaaactttatgtttccattcaaacaatatgcatttttcagtatctattgaccttgaaaaataaaaaggtttatttggggatggcggggaatgtataggagaaagaaaaaagtaagcgcatacatggaggtgcttttaatggagtttgttcaatatgcatgtaatggggccgttgcagagattatcctgaatcggcctgatgcccatcacgccctgaatgaacagatgctgtctgaattgaaggaggcagtcgaaatggcggctgcaagcgaggcgctcatcgttctcctgagaggaagcgggaaaggcttttcggccggcggtgatatcaggatgatgacgtcagagcatgaccctgaccaatttaaacggctgatggatacgattgaggctgtcaccctgaatttatatcagatgaagaaagtgacaattgcagccattcatggtgctgctgcgggactgggcctgagtttggcgctttgtacggacattgtgctcgctgaaaaaaacgccgttctcgcgatgaattttatcggcattgggcttgttccggacggcggaggacattatttgctgaagaaaagaatcggtgaagcaaaagcgaaaaaactgatttggagcggaaaaaaactatctgcctcggaagctgccgatatggggcttcttgatgggacatttgccggagaccctgccgaaggcgcaagacccattatcgaaaccctgttggcctcccctcttttggcgatgatcgaaacgaaaggtatttttcaaagcctccaaattgaagaactgaaaaaagtgctatcccttgagcgcagcgcccaagagagaatgagaaggaccaaggatcaccaagaaggaatccgtgcctttttagaaaaacgggagccgaagtttcaagcgtaacagatcagccggaaagctgatcatctgtgaaacaaaatcagctttccggctgcattgactaaacgatgagtatgactatgaagctctttttcttttaagagggcttcaccatgcgtttttgccgcttcttcatgttctgcctcgaattgctcgtttaccagcgtgttccccgaaggatcaaatacggtaaggaaataatcagccatcaggtttctcctccattttaaggtttatcagtctttcttcatttatattctaaaaaggaaatcaaaatcctttattatgctttatccaaaattagtatataatgggtcagggaaggaggagattcagtgcttacaattgatcacgtaacgaagacatttggagattataaagccgttgacggattggacttagatattccggaacagcaaatgttcggtctattaggcgcaaacggagcgggaaaaacaacaacgtttcgcatgatcctaggattattaagcattacggagggctcaatcagctggaagggccgtcctgtgaattatcatatcagcaacaaaatcggttatttgccggaagagcggggcctttatccgaaaatgaaggtaagggatcagctcgtctatcttgccagattaaaagggatggagaagcgagaggctgtaaaagagctcgggacatggcttgaacgcttcaatattacagattacgagaataagaaggtggaagagctttcgaaggggaatcagcagaaaatccaattcatttcggcagttttgcataagccggagctcctgattcttgatgaaccattcagcggcttggaccctgtcaatgttgagctgctaaaagaggccgtgatctcgctgaaaaacagcggtgtttctattttattttcaagccatcggatggaacatgtggaggagctttgtgagaacctttgcatattgcagaaaggaaaaccggttgtacaaggcaagctgaaggagatcaagcgttctttcggtaaaaagaatgttaccattcactccgatgacgatctgcgctttttgcagtcccatgaaggcattcttcaatggaaggaaacggcagacggcgtcaagctgcagattgccaatgaagacatttctcaagagatttttgcgatgctacagggaaaagggtttatcagaaagtttgagcttgaagagccgtcactgcatgatatttttatagaaaaggtgggggccgtctatgaataaattttggatcatgctttctcatacatacaaaaataagattatggcaaaatcctttattatttcgactgtcatcacggtgctgcttgttttagttgtaacgaatctggagtcgatcatttctttgtttcaaggtgacgatgcgaaagaaaaaatcgccgttgttgatgaaacaaacgaattatatccggttttttcaaagcagctgaaagcggtggatactgacggcgatcttgatgtgaaactgtcgaagcaatcggaggatgaggtcacaaagcaagtcaaagatgaatcactcgatggcatgctcatcatcaaacgagatgaaaaagggaccatttcaggaacatataaagcgttaacgatttctgatgaaagcacgtatcaaacactgcagcaggcgctgacgcaaaccaaaacagctgtcggaacagcggagctcggcgtgtcgcaggaaacgatcagcagcctttatgcgcctgttactgtggggcagaaggcgctgaaagaaggggcaaagtctgaggaagagcttggccagacggtagggcttgtttacattatgctgttcgtcatttatttctcggtgattatgtatgccagcatgatagcgatggaggtcgcaaccgaaaaatcttcgcgagttatggaaatcctgatctcaagtatgccgccgatccagcaaatgtttgcaaagctgcttggtatcgggcttgtcgggatcacacagcttgctattattataggagccggctctctgtcgcttaagctgaaccaaaagagcgaaacggcttcatctgtcggcggattccttaatttgaccaacgtatctgcaaccactgtcatctatgctgtcattttctttttgctcggatactttttgtacgcgacacttgccgcgtttcttggcagtgtcgtcagcagaatagaggacgtgcagcaaacgatcacgccgatgacgcttttggttgtcgccggttttatgatcgcgatgttcggtttgaatgcgcctgacgcaggatttattacggtaacttcgtttattccgttctttacgccaatgattatgttcctgcgcgtcggcatgcttgatattccgttctggcaggcggctgtcggaatcggaatcacactgctcaccattgtcatactggccgttatcggcgccagaatttataaaggcggtgtattaatttacggcaattcaagcgcgttcaaagcgatcaaacaagcgctacgtttagcgaaaaactgattggaaaacagcctggggattctcaggctgtttcttttttgacagaacgtgcattcgcaagaattcggtgctaaaataagggtacttcatcctggaaaggagcagaatgttgactgatctaacctttattcatgcggcagatcttcatcttgacagcccgttttacgggatatcgcacctgccggagccgatttttgcccggattaaagaaagcacgtttgcaagcgtgagacatatgatagacgccgcagtgagagagcacgttgatttcattttgctggcgggagatctgtttgatgaagccaatcgaagcttaaaggctcagctctttttgaaaaaacagtttgaaagactcagagagtgcggaatttcggtatatgtcatctttgggaatcacgatcatcttggcggggagtggacgccgattgaatggcctgagaatgtccatattttttcgtccgctgttccagaagaaaaatcatttttaaaagaaggcaggcgcatagcaagcatttacggcttcagctatcaagctagagcagtgacggaaaaccaagccgcccgctatcggagatcaactgacgcaccgtttcatatcggcatgctccacggcacgctctcaggatctgaaggacacgatccgtattgcccgtttacccatgacgatctcgtgaaaagcgggatggattattgggcgcttggccatatacataaacgccaggttctatctgcagagcatccggcagtcatttacccgggaaacacgcaagcacgccatatgaaggagacgggagataaaggctattatctcgttcatgtgacaaacggagatatatcttatgaatttcagagagcgcatgatgtcctgtgggaaaaagcggcggttgatgtgacggaggcaaataatatgaccgctctcttccaaatggtggaggacacgttttcgaagctgcggaaaaaggggagccctgtttgtgtaaggcttgttttacaagggacggcgccggaatggctgctggaggcgccaaaaggcaccttggatgagtttcttgaagctcttcaggaacaagaagcggaagaggaacatttcgtttggcctcttggattggacgatgagacagaaaacgaagcaaacctaacaaaccttgatcctttttttggcggtttatttgaagacattgatcgcagcgatctgtcagacgtgctggaagggcttgagcggcatccagtgtatagaaggcacgcggaccggtttagccaagaggaggtaaaggaaataaaagagcaggcacagatattattgaaaagacagcttaaggtgcttgatacatgaggcggtgacagctttgcgaattatatctttacatatctaccaatacggaaaattttccaatcggacctttgacttttccgcctctcctgtccaagtcatctacggattaaatgaggcaggaaaaacgacgatgatgtcattcattgaaagcatgctgttcggttttccgaaaacgaaaaagtatgaaccgaaaacaggcggtgtctacggcggtgttcttgaagctgaacatcctgagtatggggtgctgaagatcgaacggacgaaagggactgccgaaaaactaagcgtgtacacagaaaagggcgaagtaaagcagggagatgttttaaagcagctgttccagggcacagacaggtcgttgtacaaagccatatattcgttcgacgtattcgggctgcaggaaattcacgcctttaatcgggacaagataggggaatttttgctcttttccagcttgtttggtgctgaagccgtatcaaagcttgattcaaggctgacgaaggaaagcgaaaggctctataaaccaaatgggcgaaaccctcaattgaatcaggagctggaaacgcttaagcagctggcagttaagctaaaacaggctgaagcagaggaagcgggctatcatcagcttctcgaggaaaaacgaacgcttgaagcccgccttgcagccgcggaaaccgaattgaaagagacggcgggacatatccgaatgattgagggagcgattgagcgaaagccgctgctaaatgaaaaagcgacactcgaacaggtgattgcagaatttccggaacacgcaggacaatttcctgctgacggactgcatcagctggaaaaatatgaatcccatcttcacccgaaatcagcacagcttgaggcgcttcgggtgaagatggcggagttggacaaacagaggcaaaagcttatccccgataaagaactattggcgaaagaaacgctgatacaagagctttcggcagcgtttcatatgtaccaatcctggggagaacagctggcagccattcaggcacagctgcgccagacgtctgcgcagacagcggcagggctggaacagctcaataaaacggatgaaaatgagctcctgaatatgaacacctcatatgattatgaatggcagcttcagcaagcggtgcagcaatatgtacaggcaagagacagaaaacggcagcttgacgagacgtttgaacttgcccggcaagagctggaagacgcggaaaaggccgttcgtgccgcttcgtccgcgattcttgaaaacagccaaagaaaagataaagaagcagctcttagagcatatgatgaaacacaggggcagcaccaagagcaagcgaagctcagagaacagctaacgttttttgaaagacagcaggctaaacagaaaaagactgtcattgcagctggtatgttgttcatcgttctcttttctctgctgcagcaatggattcccgccataagtttcggcgctgcacttattgtgtattggcttgtttcaggaaagtcgtcttctcgaaacagccgagagacaagacagcccatgacggatatttcaccagcagaagctgaaatgcttagagaagcgttatgggaggatgaccgcaataagcagcaccttctcacacagcgtgcagcgctccagcaaaaagaggcggcgtatgaaagggtcatccagcagtttgaacagtgggaagccgaaatggcgccgtcctttacacaggttgagcgttttatgaatgagctcggatttaaggaagatccatcatttttgcttgatgcatacagcttaatgaaggatgttaaaaaagaagtgaagaaaaagcatgagctgaccatagaagcaggcaggctgaaaaagcaccggagaacattcgaagaacgcgtcagtatgcttcttcccgtgaatcagagtcaggatatctccatttcggacgcccttcacacattgcggaaaaacattgaacgtgaaaaagaaattgagaagcaaaaaaaggaaattgaaacagatattcattatacaaaggaacagatgcttgaacttgagcaagaaatacagtatttccacgcacagattgaacagttatttgccgcggctgctgcaaaagacagagatgcgttttttgccatagccgacatcagcaggcaattgaagggtacggagaacaagcttcatcacgtaaacgcacagcttcaaggcgggtacccggaggaacttgaactggcggattccaatacgctttctgaattgaaagataagcaatttgttgagaatgaaagaaaagagcggctgactgaggagatcgagcagctccgcagccaaatcgcactgctctcagtcaaacaggaacaattagaggcttcgggaatggtctcagacctcaagcttcaaaccgaaatgcaaaaagaacgtgtgaaagaaacggctaaaaaatgggcctccatacaaatggtcagacaggtgatcagaaacaaattggagcggcataaaaaaatcgagcttccgcgccttctagagacggcaggagaatttttccgccctctgactgacggaaactaccaaaccatttatttttccgaaacggatgattcgatcatggttatgcatcgcgatggaactgtctatcatgcggaagagctgtcacaagggacatgtgaacagctgtatacagcgatccgatttgctttggccgttacgcgccagggtgggtcaaagcttccgttccagcttgacgacagttttgttcattttgatcaggaaaggctgaaacgtgtattacatgttctgtatgatttatctgaaggcggtaggcagattttgtattttacatgccatgagcacgtaaaagatgcatttcatagcagccaaatcatccatttggtgtcataaaagaggttctatagctgaaaatcggtatgtgatatactggtattatgtaagatacggagggagctttaatagaatggctaaagggattatgctacatgaggttggcgaacaggtggaccagtatctattgattaaatcctcgacgaaagggattgcaagcaatggaaaaccgtttttgacgctgatgctgcaagaccagtcaggcgatattgaagcgaagctgtgggatgccaagcaaagtgatgaagtgacctatgcgccacagacgattgtcaaggtcgtcggcgatgttcaccattatcgcggacgcacccagctgaagctgagaaatatcagaccggtaagcgagcaagaaaacgtcaatattgatgattttttagaaaccgcgccgattccgaaaaatgaaatgatggacaccatcactcaatatatatttgaaatgaaaaatccgaatatccagcgaatcacaaggtttttggttaaaaaacacgaagctgagtttatggattatccggcggctacgaaaaaccaccatgagtttgtctcaggtttggcgtatcatgttgtctctatgctgaacctggcgaaagcaatagcagatttatatccgtctcttgatcgtgatctgctttacgccggtgttatcctgcatgatcttggaaaagtgaaggagctgtccggccctgtttccacttcgtacacggttgaaggcaatttgctcggccatatttcaatcatggtgacagagctttcaaaagcggctgaggagcttcaaatcgattctgaagaggtgttaattcttcagcatttgattttgagtcaccatggcaaagcagaatggggcagcccgaaaccgccgatggtgaaagaagcggaaattcttcactatatagacaatctggatgcaaaaatgaatatgatggacagagcgcttgagcgcgtgaagcctggcgagtatactgaacgtgtatttgcactggaaaaccgttccttttataaaccgacatttcataaataacttaaaaaggactgatgctgacatattcagctcagttctttttgatgcgtctttcccgcacataactcgtctcattcccgcatatggttaagaataaagaatctatgcaaagggggaggagcccgtgttattttttccgtggtgggtgtatctttgtattgtaggcattattttcagcgcatataaacttgtgacggcagccaaagaggaagaaaaagtagaccaggcttttattgaaaaagaagggcagatttatatggagaggatggaaaaggagcgagaacgccgcagttctcagcagcatgaagaagaaaatcaaaaccattccatcgcataaaaaaagctgtgcggctcaatgagcctgcacagcttttttattatttagaattgcttgaagatgaagaagtgctgttacttgttgaagatgtattaaatgtgtctttcagatctttatcttttacttcgatgtcagccttcttcatgactttttgaacagcttcctgaacggcattgctgtcatttagtttttgttcaagcacttcagatttcagttcttttttcatatcttcatattttccgcgttcttcagtctttttgatgatatggtagccaaattgtgttttcacaggattgctgacttcatttgttttcaacttgaatgcagcttttctgaatgtggaatccagttgttcgttatcttttgaaatccagccaagttcgccaccgtttgtagcagtggagtctgttgagtattctttcgcaagatcttcaaacttttcgccttttttcagctttttctctacttcttcagctgtctttttatcagcgacaacgatatggcttgcgcgaatctggccttttaagccttcccagtattctttaatttcatcatctgtaactttgatgttatctttagccgctttttgtgtcagcaattcatattttacttgttctttcaggtaatctttgccatattgcttttcgagggcagtatattgatcgccaagctgcgttttatattctttcagcttgttgtcaatttctttatccgaaactttatacttcttgtccaatactttttcttgcactagctgtgtcagtacgcttgcgccagctgttttcttcatgtttgtgtaaagctcgccttttgtgacatcgcctgcgtctgtttttgcgataacttctttgtcgccgctgctgcaagcactgagagcgaggatgcttgtagcagtgatagctgctattgcgattttcttcattgttttcaaacactcctaatcattccaaattaaattacctatgcgtatcataacatattgtggctttctgtaaaaagattttaaataaagggcattcgtctagtcaaacttttgctgatgacatacttatatattgatcaagaaaaggaggtatgtaacatgagcggaggatactctaacggattcgcgttgctcgtagtactgttcattttgcttatcatcgtaggtgcagcttacatctactaagcagcccgaggatcgcttgcaacataagcgatcctttattttcactagcgcctaatcgtttcaaacatgaattgcataacatgtaattggtaaataaagcttattacaggaggtgctttttaagatgggtgaagtatttgcaggcggattcgctttattggttgtgttatttattttattgattatcatcggcgcttcttggctgtactaatcaacataaaaaagcatagctgcttaatcagcagctatgctttctttcgtatttacactgtaaaggagatctccacaaacgaagagatcagtaaaattaatatagatacattaataaatcggaataccttatcttgccgctcttcaggaatctctctgacaaggcataatgtattggtgagcctgtttatgaaatataaaataaacacggcagccacgataaaatagaataaaatgatgggagattccccctctctctgaactgtcccatattacattaccaaatatttattaaaaaagatagaatgcaaattgaaaaatcgccaccagcaccagggtttgactacttttcaacaagaatatccaagccgtcagcttcctgatcaataaaagcggttttcggtgcttttatcagcttgagagccagcaggaaatcaggcagacagtagccggcgtgaatgcccgagatcatgcagaaataatgagcgtgattcggaaatgccagtgctgcgtaaaacaataccggtgtaatcagcaagaacgggctgacgagtgaaatcagcattgttgtttttggtatacgtttccatgtgcgcatgcgcaatatggaaaactttttttctatttttctttttttgcagatgattggcaggacatggatgactttatgtgcaaataaaataacgacgagcaaaccgccgaataaagatacatattcatcgcttaagcttgtgccaggccgcagcagctcaaaagctaaaaaggtagatataaaaaccaaaatcataaaacatacagcagttaatattatgcgaacggcgccataatccttcatgagatttatggtcttccagcaattcatcaaagtcatccttccatacatcttgaatagaatctcaaaataatttactcctcccaagagaaaaaatcaatgcttttttaagaaaaaatatcatccggcaggtatttttttgaaacaagcaaacaaactgcgaaatatggggttagaactttcttctcagtgaattatcagctaaaataagattaaagatagaaagaagtggtgtggatggattcgatggatcatcgcattgagcgattagaatattacatacaattattagtgaaaacagtagatatggacaggtaccccttctatgcgcttctcattgataaagggctgagcaaggaagaaggggaagcggttatgaggatatgcgacgaattgtcggaagagctggcaacacaaaaagcgcaaggatttgtaacctttgataagctccttgcgctttttgccggacagctgaatgaaaaattagatgttcatgaaacgatttttgccctgtatgagcaggggctttatcaagagctgatggaagtctttatcgacatcatgaagcattttgattaactgtttacaggttcaagctcttcagccggttcatccgccgcactgtcctttgcttttttcttcagttttccgtttacgctttcaaagtcattgtcaatattggtgagtgacgtttcgaaaatttccataaaatcatcgccgtagatatggcgtatcatacacatcatttctgccacttcaggaaattttccgaataaatgatacaaaggctgtgaccctttaaaaacagcgttgcgtgtcggatcaaattcctcaagcaagctccagaatacctcggtaccttcctcagtcaattggacatatgtgttccgtttatcattcagccgtttggagaaccttaaatatccccgttcttccagcttttttgaaaagttgaatgcggttgatacgtgcatgaccccgaacttcgcgatttcagaaatggaagctccattcaattgatacgcaatccataaaatatgatgctcattaatattcaggtcatacggtttgagccattgctgccaatccttctcgatcgatttccaaagagctttgctaagctgagccattttctgggtgaaaaccagagcttctttcacatcatagggcggttccactcgattcattacgtcacctgcttctctttttctttttctctattatgccaataaaataaagattaataaagatgaaaatgtaagaattttttaataaattcacaaaccattgcgacgaaagggtttttcggccaaaaaaaaatacgggtccaattttggcccgcatttttttcttttgaataggatattagttttgtaaggttttctccagctgtctgattttctcttcgatatcggcaatttctttttgcagatcctgctggtgaggcttgatctcttcctgccattttttaattgacgtttggagctcgccgcccacgtctttaataacatccgtgctttcttttgccgctttgatcagctggtcttttaatgcaagcccgtctgactttaagcgtttgattgtttcttcaaaagaatcataattggttttcattttttcacgcagctgctttcctgaggaaggtgcagtaagaagaaccgctgctcctccgatgatgccgcctacgaatagtcctgttaatagagaacgtccgctcgccattacaatcaccccgtctttttcttcaaaataggattcattcagcatttttcatttttgttgaaagcctgaacttctatacatagcttgctttattttagcatattttttaagtgaaaaggagggagaaggttgtctgtctttttgattgtattatcctgcatcacccttgccttcgcttcaggcgctgtttactatatcaaacttctcagccaggctgcttcttatccgcccaagagggttatccggcagaaagcgcttgtttgttcaaccggaaccgcctttacactatgtcttatctttttcacaaaactcctcgcttaaaacatgctgacatgctgcgggcgctctgttcaaaaaaacctctcccggaagcggaagaggttttgtgtgacaattatttagcagcttccataaagcttgaacgccttaaaatggtttgcacaatcggataaataatgatcattgagattgtattcagcacagcggccggcagaacaacagccgcgaacaatgcggcgaaaccgcccggtaaaccgacgatcaataaagctgacgatagaaacacaattcctgataagatggtcccgatcactgtcagcacagcggctgcacctgttttccggctctttctgaacaagagaaacagggagaagaacagaaacgctgatacgggtttatcaatgatgttagggatctgtccggctggaaacgcggttgtaagcgcggaaatgattccggtcacgatcccgatgacgagtacattttgcacccgcgggaacagcagaatgcccatgaacatcatgatcagcatcatatctggtttcatgccgcctaaaaagggcggaataatggaatgaagcgctgcgccgatagcggcaaacagagccataatgactaactcttttgttttcatatctatgctctcctctgctaagcttttgccctccaataatatgctcatcatttattgcgaaggctttacagaatgtgttatgcaaacagtataccaaacgaacggtttgcatagccagactttttactcattttcctgctggaatttcttcatgaacgcagctaatttttcacagtcttcgagagagaccgcgttataaatagaagcgcggcagcctcccaccgaacggtgtccgccaaggccgatcatcttcgcatcttttgctttctggacgaatgttttcgttaattcgtcatcccgaagcgtgaaggtgacattcatgcgtgagcggctgtcttttctggcatgtcctttatagaagccgttgctttcatcaatacagctgtagagaacctgcgctttttgttcattgcgctgttcagcagtttccacaccgccgttttccttgagccactccagaacaaggctcagcatataaatcgcaaatgtcggcggagtgttgtagagtgaatccgctttgacatgcgtggaatatttcaggatttttgggacgttcgcattttcatttttcagccagttttttttcatgatgactacagtcacgccggaagggccgaggttcttttgggcgcctccgtagatcacgtcaaatttagacacatcgatttttctgcttaaaatatcgctggacatgtcggctacgagcggaattggagaattcggaaactcctgccactgagtgccgaaaattgtattgttggatgtgatatgtaaatatgcgccgtcttttacatccgtaaggtcaacctctggaatatagctgtaattgtctgtttcacttgtagcggtgatagacgtgttcccgaacaatttcgtttctgccagtgctttttcagaccaagcgcctgtcatgacaaaatgtgcggttttttcaggtgttaaaaagttcatcggaagcattgagaattgaaggcttgccccgccttgaagaaacaagatatcgtaatcttccggaatgcccatcagttcgattaagaggcttttcgctttttggtgcaccgcttcatactctttgctgcggtgggaaagctccataatagacatgccggattcgttaaaatcaataaattctttctgtgctttttgcagaacttccagtggcagcgctgcaggacctgcgttaaaattcgttgtacgttccattatgatctctccctgttttccacgttaatgtataaaataatacaattatcctatcacaaaaattcagttttttgataaaaaattagaattatcaaaagaaattgacggatgtttgcgaaatgttcacaaaataaaataacctcatcttatgatgaggccaggcgttttgcgatagaggaagagatgttctgcagatcctccggtttataatcatcagcatgcgttttccaaaccgctccgaatccatctccttttccgtagcgagggataatatgcatatggtagtggaacacagattgtccagctttttcgccgttattgttcagcgtatttaagccgatcggttcaaattcatcccggatagcgcgggcgattttcggaacagcatggaaatattgttttgctaattcatctgtaaattcatatacattctcaatatgtgttttcggaatgacaagcgtatggccttttgtcacttggctgatatcaagaaaggcaagtacatgttcatcttcatacaccttcgcggatggaatgtcgccggcgataattttacaaaagatacaattttctgcacaatgcatgagggttcctccttatgaaattgtttagtatgtatacactcatcgtaccacagaaatgcagaaaatagaaaacaggatgaacggcgagcgttcaccctgaatgcagaggaagagcttatatgaagaaaatgtgttatgcctttggtaagcacctcatttgtcaataaaatgaagacttgtttaatgcctaacgattcctgcgataaacacctcatttgacaatttgcttcatacatgaagaattcatcaattcagtgaagagaaatggtttgagcattggacatgtttattttctatccaactgtttctaagacgtctttgacaaacacctcatttttcagttgatatgcttttcctctacaactattatgatgtccagaaccctgtctctttatgacagcaaattcatcatttgttaaaagggaattgtttcaaatcaggccttgtttttggtactatgaagaaaaacactataaggggagaaactatgtctctgctatcggtaaaagacttgaccggcggatatacaaggaatccggttttaaaaaacgtatcattcacccttgaaccgaatcaaattgtcggattaatcgggctgaatggtgctggtaaaagtacaacaatcagacacatcatcgggctgatggacccgcataaaggttcaatcgaattaaacggtaaaacgtttgctgaggatccggaaggctaccgttcacaatttacctatatacctgaaacacctgttttatacgaagaattgacgctgatggagcatcttgaactaacagccatggcatatggactgtcaaaagaaacgatggagaaaaggctgcctccgctactaaaggaattccgaatggaaaagaggctgaagtggttcccggcccatttttctaaaggaatgaagcagaaggttatgattatgtgcgcatttttggcagagcctgcgctctacattattgatgagccttttctagggcttgatccgcttgccattaacgcgctgcttgaacggatgaatgaagcgaaaaaaggcggggcgagcgtgctgatgtcaacacacattttggcaacggcagaacgctattgcgattcgtttattattttacataacggcgaggtgcgggctcgcggcacgctgtcagagctcagagagcagtttggaatgaaggacgcggcgctggacgatttgtatcttgagcttacaaaggaagacgctggccatgaataatatgcttgatatttggcagtcgcggctgcaggagcatatcaaagaaacaagaacatacatgaaatatatgctcaatgatcacctcgtcattgttttgattttttttctagcgggcgctgcaagctggtacagcaaatggatacgggacattcccgctcactttccatccttttgggtgatggccgtgctgttttcgctcgtgttgacaagctcttatgtgcgaacgcttttgaaggaggctgaccttgttttcttattgcctcttgaagcaaaaatggagccttacttgaagcaggcgtttgtctacagctatgtgtctcagctgtttccgcttattgcgctgagcatcgttgcgatgccgctttatttcgcagtcacaccgggggcttcgctcgtatcgtatgccgcggtctttgtccaactgttgctgctgaaagcgtggaatcaggtaatggaatggcgaacgactttccaaaacgaccgcagcatgaaacggatggacgtcatcattcgctttgcggcgaatacactcgttctttattttgttttccaatctgtttatatgtatgcgcttctcgtctatgtcattatggctgtcctttatctgtatatgtcttccgcagcaaaacggaaaacatttaaatgggaaagccatattgagtccgaattgagacgaaagcagcgtttctatcggattgccaacctgtttactgatgtgccgcatttgcgaaagcaagccaaacgcagagcttatctcgactttttgctgcggcttgtgccgtttgaacagcgcaaaacatttgcctatatgttcacccgcgcctttttgcgttcgagtgattatttgggcattcttgtcagattaacgatcgttttcgcgctgatcattatgtatgtctcagctagcccgttgattacagcggttttgactgtgtttgccattttcattacgggcattcagcttctgccgctcttcggccactttgaccatctggcgcttcaagagctgtaccctgtgaaaaaagaaacaaagctgaaaagctatttctctctattaaaaactgcacttagtattcaagcgctgctgatgtctgttgcatctgcctatgcagccggcttgaccggttttctgtacgcgctgatcggttctgccgttctgatttttgttgttttgcctgcttatatgacaaccaggctgaaaaagcacggaaagctgtgaactgaaaagaggtaatcaaatgacagataatcagctgctgatgcaggaagctttggaatggaaaatgcattttttgcgaaaggattccatgtttgaacgcttttcgaagcgtgtgcagacgaaggtgaatgaacggattcctgaaaaaatccatacggtcgtcaccgagagtgtgaaaaaaatggtagaagcgacaatgaccggctccaatatcatcacttataaaaaggatacaagtgcactgtcgctcagtgaaaaaaatgaattggcgaaaaaaacgattgtttcttatcagaaagtgggagctgctgagggagtcggcaccggagcgggcggcatttttttaggcattgctgattttccgctgctgctttcaattaagatgaagtgtttatttaccttgtcttccatttacggctttgatgtgaaagatgcacaagaaagaatgttcttgctgctcgtgtttcagcttgcgttttcgagtgatgatggccgtaaatcgcttttttctgtcatcgaaaattgggagacggagaaaaagagcatcgactggagagtgttccagcaggaatatcgcgattatatcgacgtcgtgaagctttttcagcttttgccgggcgtaggagcggcagtcggcggaattgccaattataagctgcttgctcagcttggagaaacggcaagacatgtttttcatctgaggatattaaaggaaacagccggagaataaacactccggctgtttttttatagctgatgataggtgatcgcagcgccggcaaggaccttggccgctgtcagcatggctttttcgttgatatcaaatttcggatggtggtgggaataaactcggtctggctgttcgggagcggcacctgtaaagaaaaaagtgcctttcacgttttgtaagtaataagcaaaatcctcgccgcccatttgcggttcaccttcaatgacctgctgaacgccctcggtattctttgcggtgctcaccaagtggctcgtttcggcaggatggttcacaaccgccggataaccctgttcataggtgtactcataggacgcgccgtgcatgctgcatattccttttacaaccgctttaatttctttctccagaatgtcccggacattttcatcaaaagaacgtgctgtgccgatgagtactgcttggtctgcgatgacattaaacggattgtctgcgatgaaggaacctgtcgaaatgacggcggattgaatcggattgactttgcggctgacaatgtgctgcaaagaggtaacgatttgagaaccgattaggacggcgtctttagtatcatgcggatgagcgccgtggccgccctttccgaagactttaatcgtaaatcggtctgccgccgccattacggcaccggggcggcaaagaatggttccgagcggctcagttgcccaaagatgagtgccgaatatcacatccgcgttttcgagacagccgtcatcaatcattggctttgcgcctcccggataatattcttctgcatgctggtggatcatcacaaatgttcccttcagttcatgtctgttttggtgaaggaccttggccactgcgagaagagctgcggtgtggccgtcgtggccgcatgcatgcatgacaccaggcactttggaggcgtaagggacatctttttcatcttgaatggggagagcgtcaaagtcggccctcaaagcgactgtagggccgggttcgcttccttctatatatgctaaaacccctctgccgccaacgtttgtgcggattgggactcctaacgattcataataggaagcaataaatgcggcggttttttcttcttgaaatgagagctcaggatacatatgaaaatggcgcctgatctcaaccatttcttcaaaacagccgtcgagctgtttgtttatctctttctgcagtgtggatatggacaaagccgcttcccccttttctatgttttccatgattgtatataaaaagtctgaatatttcaactcatgctgttttaaagcatcatcacagctgcgagggttgtcaccaaaaggccaatcgcgacgggaatgaagttttttctggcaagctcaaaaggatcaactttgcaaatggccgcggcgggaatcagcgcccatgggactagtgttcctccgcccacccagatggcagagatttgtccgagcgcggtcagaacggcgggatcggcatggagagcggacgaaaagagctttgcgatggagccggcgagagaaatgccagaaaatcctgagccgtcaaggcctgttatggctccagcggcagttaatgcagcggcggcaagctcctttgacataggcatcatatgggataaagcaatgccgagatcgttgacaatgccgtgggaacctttagggagtgaagtgcccagtatgctctcatagcctgagtcgccaagataaaagaaagcggcaatcgggatgacggggccgaaaaccttaaaaccgaatttaaatccgtcaataaaatagccggtgattttttcaagccctttatgcttatacacgaaaaaatgaacggtaaggaggatacagattgcagacccgccaattaacgcggtggcatcatttccttgtaggttaaacaagagcatacaggcgatatctgcaagaaaggcaagcggaatcaaaaaagccagtatggaccgcaggcgttttggtaagtacagcgagttgtcttgttcgccggaaagaacgggggaaaaagaagcgggatgctcctgttttttgcgttcgcgctgaatcatgataaaggcagctgttgttgttgtcacacccataatcagcacaagcggaatgctggccgagacgacatcaccgactggaatgcctgctgcatccgcagtcagctttggcgccgcctgaatgacaaagtctcctgacagggcaaaaccgtgtccgaataagttcatggccatggccgcggcaagaggcgtcaaaccggcacgtgcggctgcggggagcaggacggcgccgatcaaagcgacacccggagaaggccagaagaagagagaaatggcgaacatcaggcctccaatcagccaataggcagtcacaggccctctcacaaggcttgcaaagggagaaatcatcgcttcatttatccctgtttttgttaacaaatcactcattgaaacgataaagcaaatgatgaaaatcgtgggcagcagttcgccggccgcatagataaagctgtggaataaactgctgacagaagctgaaagtgaatggctggcccatagcgatatgataaaaatgccgaatagagaaataaatgtcgtgtcttttctcagcagcataaataggataattactccgataaaaaacacatacagaacatggacagacaaaatcccgacttccatcatcgatcactccttccgcttacagattattcataggcgggcggaaggtgccgggacagaggggagggttatgatggaagatgaacattgatctgtttcagctgctcatcagatgatgccttaatactctattcgctttttgcagatgttttgggaagcattcaggagaaaaaatgacgcacccttcagcaaaccagttttttctataggcgatgatgctttccgatggctctaaatatgaatcatcctcgtgctgcatctcgtaatcatcaaatccgaactgaaaaccgcagcacgggcagatttcatgagaatgattgccttcatgatcatatggcggttcagtcaatcccttaaacccgcagactgggcaagtatgcttcattttgctttcctcccaataaaataagctgccggacatgccggcagctattcgacagcgaaatatgtggtgacataggaaggccgggagaagatcgacgttgtgtcaattccggcagatgtatcgcgttttttgtgggcttctttgtaagaaccggactgctgccagtcttgaaaggcgctttccgtttcccacaaggtcagaatgacataggtgtcactgtcaagcggacggagcactcgaattgcttcaaagccaggctcgttttcgacttttcccgctctgtttttaaatctgttttcaaacagcggacgtccttcctgagtgacggcaatattgttcaatactgcaaaaccgggatgtttgatctctccgacttggtcaatgacttcataagcgtgtggtgcctggaaaacggtatctccgtttgtttcatgaatcaaaatggcgttttcctgcccctgcatcaaaaggatattttctgagggatgcttttctacgatcgtttttaaaaaatcggctgtcccatatgtaatataaaccttcatatcagccacctcctgcttgctagtatatcaaaacaatggtataagtttctattggcgagtgcttcgaacataattccaaacaatttttcccatactacctttagaaaggcgaggtgagttcatgtttaagataaagaaaaagaaactttttatacctatcattattttagtgttaactgcttttctcgctttaataggatatatttcaattatttttctcggccattatgtcatagatgaaaagaagctgatacttcatgcttcttcaaaaattgttgatcaaaacggagatgaggttgcaagcctgtatacagaaaatcgtgagccggtctctatcaatgagattccaaagcaggtcagagaagcgtttatcgctgttgaggataaaaggttctatgagcatcacggcattgatgcaaaatctgtcggaagggcagtgtatcgcgatatattagcaggcggaaaggtggaaggcggaagcacgatcacccagcagcttgccaaaaatatttttctgacacatgacaaaacgtttctaagaaaaacaaaagaagtgatcattgcgattaatcttgaacgggattacagcaaggacaagctgcttgaaatgtatttaaatcagctttacttcggacatggggtttacggcatacaagcggcgtcccactattattttaataaagaagtaaaagatttgactgtatctgaaggcgctgttttggccgctattccgaaggcgccttctacgtactctccaattttgcaccctgataaaaataaggagcggcgtgatacaattctaggtatgatgaatgaccaaggctatatcagtgcgaaagaggctgtcaccgcacagggccgaacgcttggactgcacgtgaagaaacagtcggaaaccccttggtttgacagctacattgaccttgtgatcaaagaggcggaagacaagtattccatttccggagagcagcttcttcaaggcggatacacgatcaaggtgccgctcgattcgaagctgcagaagacggcttaccaggtgatgaaagagggaagctattatcccggaacagatcagaatgccgagggaagcgcggtatttattaataacaagacaggcggtgtagaagcggccatcggcggaagggattacacatccaaaggatataaccgtgtcacagctgtccgccagccgggttccacatttaagccgcttgctgtatacggaccggcgatgcaggaaaagaaatttaagccatattctctattgaaggatgagttgcagtcctacggagattatacgccgaaaaactacgacagcatgtatgagggcgaagtcactatgtctgacgccattacgtacagcaaaaacgcgccggctgtctggacgctgaatgagatcggcgtcgaaacaggaaaatcttatttgaaagcaaacggcattgatatccctgatgaaggccttgctctcgctctaggaggcttggaaaaaggcgtttcgccgctccagcttgccggcgcgtttcatacatttgccgcgaatggaacgtatactgaacccttctttatctcgagcataatagatgaagacggagaaacaatagccgattataaagaagaaggaaagcgggttttcaacaagcagacgtcttggaatatgacgagaatgctgcagcaggtagtcaaaaagggaacggccacgtccggcacctatcacggcgacctggcgggaaaaacaggctctacatcttatacaggcgtctccggcgcgacaaaggacgcctggtttgcaggctatacgccgaaaataaccggggcagtctggatgggctatgacaaaacggatcaaaaccattatttgaaagccgggagctcatacccgacgcggctgtttaaggatattttgacacaggcaggagaaaccggtcatgtgttcacaaagcctaaaaacgttaaagacctggaaagcccgattgagctgaagccggtcaaaacactcacagccgattacacatttaaagcagcggggctctttactattgaattaaagtgggacgctcaagaggatgatcgggccgtatacagaatttatgtaaacaaggacggcgaggagacgcttcttgattcggttgaagggaagggaagctatgaaattccttatgccaacttattttcgggcgcgtcttataaaattgtgccttataatacacagacaaaaagagaaggggaaggaaccgattacgttcagccgaaattgttttcctcttaatggaattcggcgattttttgaactttgagctacatttctataccatttgcctaaaacaaggtatagtgtaataagtcaagaaatacgaacgtatggttgccgtatgaaaggtggaaatcagatgagtaaacgagaaacgtttaacgagacgtttttaaaagctgcgcggggagaaaaagcggatcacacgcctgtgtggtatatgagacaagcagggcgctcacagccggaatatcgcaagctgaaggaaaagtacggattgtttgagatcacacatcagcccgaactttgtgcgtatgtcacaagactgccggttgagcaatacggagtcgatgctgcaatcctttataaagatatcatgacgccgctgccgtcaatcggtgtggatgttgaaatcaaaaacgggatcggtcctgtgattgatcagccaatccggtctctggcggacattgaaaaactcggccagattgatccggaacaggacgtgccgtacgtgcttgagacgattaaactgcttgtcaatgagcagctgaacgtcccgctcatcggtttctcaggtgcgccttttacgcttgcaagctatatgatcgaaggcggcccgtcgaaaaactacaataaaacaaaagccttcatgtacagcatgccagatgcatggaatctgctgatgtccaagcttgccgacatgatcatcgtgtacgtgaaagcgcagattaaggcaggcgcaaaagcgattcaaatctttgattcgtgggtcggcgcattgaatcaggcagattacagaacatacatcaaacttgtgatgaaccggatcttttcagagctcgcaaaggagaatgtgccgctgatcatgtttggcgttggcgcaagccatcttgcaggtgattggcatgaccttcctctcgatgttgtcgggcttgactggagactcggcattgatgaagccagatcaaaaggaattactaaaacagtgcagggcaacctggacccgtccattttgcttgcgccatgggaagtcattgagcagaaaacgaaggaaatacttgatcagggtatggagtcagacggcttcattttcaatcttggccatggggtatttcctgatgtcagtcccgaggttttgaaaaaactgacagcatttgtccatgaatattcacaaaacaaaaaaatgggtcaatattcctaagcatatcttttggtatcttaatgatatcctgtcaaaatgtttgtatcagatcattaaagagggtgtaaacagtgagtagaaagaaaatggggcttctcgtgatggcgtacggcacgccttataaggaagaagatattgaacgttattatacacatatcagaagaggcagaaagcctgaacctgaaatgcttcaagatttgaaagacagatacgaagcgattggcggcatttcaccgcttgcccaaatcacagaacagcaggcgcataatctggaacagcacttgaatgaaattcaggatgagattatgtttaaagcgtatatcggactgaagcatatcgagccgtttattgaagacgccgtagcagagatgcataaggatggcattacagaagcagtcagcatcgtgctggcgccgcatttctccacgttcagcgttcagtcctacaacaaacgcgccaaagaagaggctgaaaaactcggcggcttaacgattacgtcagttgaaagctggtacgatgaaccgaagttcgtgaaatattgggttgaccgagtgaaggaaacatatgcgtcaatgcctgaggatgaaagagaaaacgcaatgctcatcgtatccgcacacagcctgccggaaaaaatcaaagaatttggagacccgtacccggaccagcttcatgaatcggcgaaattaattgctgaaggcgcaggcgtttccgaatatgctgtcggctggcaaagtgaagggaacacgcctgatccttggctcggacccgatgttcaggatttaacacgtgatttattcgaacaaaaaggctatcaagcatttgtatatgttcctgttgggtttgtcgcggatcacttagaagtgctttatgataatgattatgaatgcaaagtggttactgacgatatcggcgcaagctattaccggccggaaatgccaaatgccaagcctgaatttattgatgctttggcaacagtcgtattaaaaaaattaggacgttaaagaaggcgatgaacatgagtgacggcaaaaaacatgtagtcatcatcggcggcggcattaccggtttagccgccgccttctatatggaaaaagaaatcaaagaaaagaatctgccgcttgagctgacacttgttgaggcaagtccgagagtcggcgggaaaatccagactgtcaagaaagacggctatatcatcgaaagagggccagactcatttctggaacgaaagaaaagcgccccgcagcttgttaaagacttaggtcttgagcatttgcttgtcaacaatgcgaccggacaatcctatgtgcttgtaaaccgcaccctgcatccaatgccgaagggcgctgtaatggggataccgacaaaaattgcgccgtttgtttctacgggtctgttttctttgtctgggaaggccagagctgcaatggatttcatcctgcctgcgagcaaaacaaaggatgatcagtcattgggagaattcttccgcagacgtgtcggagatgaagtggtcgagaacttaatcgagccgcttctatcagggatctacgcaggcgacattgacaagctcagcctgatgtcgacatttccgcaattttaccagacggaacaaaagcatagaagcctgattctcggcatgaaaaaaacaaggcctcaaggctcaggccagcagctgacggcaaaaaaacaagggcagttccagactctgtcaaccggtttgcagacccttgtagaagagatcgaaaagcagttaaagctgacgaaggtgtataaaggcacaaaagtgaccaaactcagccatagcggctctggctattcgctcgaactggataacggcgtcacacttgatgctgattcagtaattgtgactgctccgcataaagcggctgcgggaatgctttctgagcttcctgccatttctcatttgaaaaatatgcactccacatccgtggcaaacgtcgctttaggtttccctgaaggctccgtccaaatggagcatgagggcacgggttttgtcatttcaagaaacagtgactttgcgatcacagcctgtacgtggacgaataaaaaatggccgcacgcagcgccggaaggcaaaacgctgcttcgggcatatgtcggaaaagctggagacgaatccattgtcgatctatcagataatgacattatcaacattgtgttagaagacttaaagaaagtcatgaacataaacggcgagccggaaatgacatgtgtcacccgatggcatgaaagcatgccgcagtaccatgtcggccataagcagcgtatcaaggagctgcgtgaagcacttgcatctgcgtatccgggtgtttatatgacaggcgcttctttcgaaggtgtcggcattcccgactgcattgatcaaggaaaagctgccgtgtctgacgcgcttacctatttattcagctaaaacctccgctttatcgcggaggtttttttgatgtgcaatggcaatattgtgtaaaaaaatgattgaattgaacggcaggttatgatacatttgcatatgtacttaatgactaaaatgttcaaacggtcagtttcgaggtgaatacaatgtcaatagatcgaaaaaagctcattttggaggcggctacaaagtctttcacgcagttcgggtataaagcgacgacaatggatcttgtcgcaaaacttgcgaacgtggggaagggaaccatttatacttttttcaaaaacaaagaagagctgtttgacgagattttcactactttattaaaggaaatgaaacaaaaagcggatgaagcgatggagccgaaccttccgttccatgaaaatgtgcacagagcgctgtttgccattctggagttcaggaaaacacatcagctgacgattaaaattttccaagagaatgccgagattggtacaatggctgttcaggaagtgatccagaaaatggagcgagccatactgtcttatatcaaaagtaagattgaagacgggatcaaaagcggcgcaatcaagccgtgcgaccctgaactgacagcctttgtgatgctgaagctttatatcgcgctcatttttgactgggaaaaacaacaccccccgcttgataaagagacaattgcgggactgcttgaattgtatgttgtcaaaggattgtcagcgaactagataatcctttctctttgcaagaaaatgaccatttttcatgatgagtcagttttagaatggaggcatcaggatgaacacaatacgaagtcagtggaaagacatcgtaacaagtaaaaaattattgattcccatcatcgccattttgtttgtcccgcttatttacagcggcgtattcttaaaggcttattgggacccgtacggcacagttgaccagctgcctgtcgttgtcgtcaaccaagacaagggagcaacgtatgaaggagaaaaacttcaaatcggtgatgatctggtcaaagaattaaaggataataacaactttgattggcatttttccaatgatctcgaccaatcgttaaaggacttattgaatcaaaaatattatttagttgtcgagattcctgaggatttttctaagaatgccagcactgtattagacaaaaatccgaaaaaattggatctgaaataccatacaaatgcaggttctaactatgtaggggcaacgatcggcgaaaaagcgattgataaactgaaagcctctgtttcaaaagaagtgaccgagcaatatacgaaagttatttttgataactttaaagatatcgcaaaaggtttgagcgacgcgagcagcggcgcgaaaaaaattgatgacggcacaaaggatgcgaaaaacggaagcgcccagctgaaagaaaatctggcgaagctgaaggaaagcaccgctaccatcagtgacaaaacagcgcagcttgcagatggagcggctcaggtgacgagcggcatccaatcgcttgacagctcgctcggtaaattccaggacagcagcaaccagatttatgataaatctggccagcttgcagcaggatcaggcaagataacgggcaagctgaatgaactgaatgccggccttcaaaaggtgcagcagggcttgcctaatctgacaaacgggctggatcagctaaacagtaaagcgcaagaaggttctgagaaagcatcaaaagcggaaaaacttataaatgcgctcgatttaacgaagcttgaaacagctgtgaataacctcgaaaagtcagaaacagcgatgaatgaatttaaaaaacagctgtctgactttgaaaacagcttaaaaaaccgtgatcaggcatttaaaaatatcatcaactccagtgatttcttaacagcggagcaaaagagccagctgatcagctctgttgaaaagcagcttccgaaagttgatgcgcctgattttgatgaaattttaagtgggcttccttcagctgatcagctgcctgacatcgcaacgataaaaagctcattggaagatgtgaaagcgcaggttgcccaggtgaaggcattgccggaagctacctctaaactttataacggcgcaaaagccactcaagacgcgattgacaaattaactgctggatctgagaaattatacaatgcgtcacagcaggtgacagatggccaaactaaactgacagccggcatcggtgaatataataagcagttcgcaaaggcaaaagcgggctcagagcaattggtgacaggaagcagccaagtatccggcggattgtttaagctgttagacgggtctaaacaggtccaaagcggatcatcaaaacttgcagacggatctgcatcacttgatacaggtttaggcaagctgttggacggcacaggagagctgtctagtaagctgaaggatgcggctgaccaaacaggagatatcgatgctgatgatcaaacatacggcatgtttgcggatccggttaaaaccaaagatgatgccattcattccgttcctaactatggaacagggctgacaccttatatcctgtcaatgggcttatatgtcggcggcatcatgctgacggttgtcttcccgctgaaggaagcgtcagggcgtccgagaaatggttttgagtggttcttcagcaaattcaatgtcatgatgcttgtaggaatcattcaatcattgattgtggcgacggttcttctattgggaattggtctcgaggtagagagcacgtggagattttacgtgtttacgatcattacgagtctagcttttctagcgataattcaatttttggctacaacgatgggcaacccgggacgatttatcgcagtcattattttagtgctgcagctgggagcgagcggaggaaccttcccgttggaattgcttccgcatttctatcaggtcatccatggcgcattgccgatgacctacagcattaacggattcagagcagtcatttcaaacggtgactttggctacatgtggcagatggccggcgtcttaatcggcatcgccctcgtcatgattgcactaagcattacttactttacaatgttaagccggaaggaagaaacatcagaagaacagccggcttcataaagaaaaagaacttgtttccttggaaacaagttctttttttgttacattccccatttaataagcaatcctgtataggttaatccgccgccaaacccgaaaagcaaaacgatttgatcttttttcagcttcccggctttcactgcgagatcaagcgccaaaacaattgaaaccgaagatgtgtttccgtagtgctcaacactagtgagcgttttttcaatcgggaacggtgttttttcacaaattgactcgatcatgcgcaagttcgcgctgtgaggaacaaaccaatcgagatcatcagagctgagtcctgctttatgtaaaagccgttcaaattcgccagggacagttcttgcggcccatttatatacctcgcgtccgttttgcaccatttttccagaaccgacaagctgcacaccgtttatttcatttcgcagtccggcacgatacaaaatatcgccgccgttcccgcttgttccttgtacagacgcaagaaatcccggcgtttcttcatctcgttctactaacagcgcacccgcggcatcgccgaacagtacgcatgtcgttcgatcggtataatcggttacctttgataacgtctctccggcgatgacgagaattttttgatgaaggccagatgtgatcaatccatttgccaaatggaggccgtatgtcagcccggcgcatgtcgcattaatatccagcgcgccggtgctttcccagccgaaatattcctgtacgcggcatgccgtactcggaaaggcgtaatcggatgtggttgtggcaacgaggatcatatcgacatcatcaagcgttcctttataacggctcttgagattcttcaccgcttctatgcataaatcagaggtaaattgatgttcatccgcaatccggcgttctctcattcctgtgcgctgaacgatccattcatcagaggtatcaacgatcttttctaaatctgcattggttaaacgtctgctcggcgcataggtgccgatagctgtaatttttgcttttgacatatgaatcactccttatggtcagattataacactagatattagtatctggtactaaaaagaaggtttttttacaaaaaaagagaagtgtagataggaatctatgaaaaagaaaaaggaggctgaaaaatggtcagtcaagaagcagtagtctttttggcattatccggggctattgcgtttctgttgccaatcgggctgattgtatggtttaagcgaaagtatggtgcctcgcttaaagtgttttttattggcgctctcacgttttttgtcttcgctcagctgctggaaggcggcgttcatgtttatgtactgcaagtgaatgaaatgacgaaagaagcgatgcagcatccattatggtatggcatttacggctgcttgatggccggaatttttgaggagtgcggaaggtatatgatgatgcgattttttatgaagcgccatcatacttgggcggatggtctggctttcggggcaggccatggcgggcttgaagccatcctgattacaggcttgtcctctatctcacttattgtatacgcatttgcaatcaatagcgggacgtttgaacagcttttggtcaatggcgacgtcaaacaggcgcttttgccgatacaggagcagctgctgcatactccttcgtatgaatggatgctgggcggaatagaaagaatcagtgccattgccgtccaaattgggctgtctctgcttgttttgtacgcggttaaaagccgccggccgctgtttttgttgtattctattcttttacatgcactgtttaatgtaccggcggttttatatcagagaggaatcatagagcatgctgctgctgttgaaatcattgttgctcttatagcggctttatcagtttattggattgtaaaagcaaaaagggtgtttcaataaaaggtccaagcagcagcaatgcccgcttggaaaaatgtgaatggaaatattcattaagcgtgggtcatcagaatatttctgattcagtctttagcaatgacagcaagaatgtctgtgttttttacaagagaaacaatggtgtttctttttcttcttctcgcaagggtcatggcattctttctttttcttgcaatggtcgtggaaatctttatcgaaccactcgtcaaagaaccaaaaatcatcgaaccaatcgtgacaacgacatttctgttcatgtgaatgacgacagcacatagaaatccctcctcttcccatgctctctacagcatatgagagattgataggaaaagattggacgggtccctcgggaaaagagtatattttaagtagaaaataaaaggaggaatgccctatgacgtccgtacgtaaaacgatggagctcattaaagaacttgtatcgatcccaagcccgaccggaaatacatatgaggtgatcaattatattgaaagccttttaaaagaatggaaggtagaaacggttcggaaccacaagggcggcttaattgcaacgcttccaggacgcgacacatcccggcatcgcatgctgactgcgcacgttgacaccctcggcgctatggtgaaggaaattaaagcggacggccggctgaaaatcgatttaatcggcgggttccgctacaactcgattgagggagagtattgccaaattgaaaccgcctcaggaaaaacgtacacaggcacaatcttaatgcatcaaacgtctgtgcacgtatacaaagacgcgggaaaggctgagcggaatcaagagaatatggagatccgcctagatgaacctgttcactgccggaaagatacggaggagcttggcattggcgtcggagactttgtgtcgtttgatccacgtgtcgagatcacatcaagcggatttattaaatcgcgccatttggatgacaaagcaagcgtcgccttattgctccgcttaattcatgaaattcaaacagaagacattgagctgccgtatacaacccattttcttatttccaataatgaagaaatcggttacggcgggaattcgaatattcctcctgaaacagttgaatatttggcggttgatatgggcgctatcggtgacgggcaggcgacagatgaatattcagtatcaatctgtgtgaaggatgcgagcgggccgtatcattatcagctcagaaagcatttagttcaattagccgagaagcatcatattgactataagcttgatatatatccgtactacgggtctgatgcgtcagcagcgatcaaatccgggcatgatattgtgcatggcctcatagggccgggaattgacgcttcccatgcatttgaacgcacccataaatcatctcttcgccataccgctaagcttctgtattactatgtacagtcaccaatggtataagggggaggaccaatgaagatttataagctgaaaagcacattcggttgggaaggtgatgacgggttgggagaacagctgattcagcagatccttgccggagaaaaaaacgccacgtgcgcgccgaaatcattgtattcaaaagatgaattgagggacgtttatcaaacagcgggtcagcttgttaccgtttatgataaacatgacaatccaagatgcaatataaaagtaacagatgtctttgaaaccacctttggtgcgcctgatatgaggttagtcaaaggagagggcaatggagaccgaattgaggagtttcaagaggatcatcggatggcatgggcggaactgatcaaaagcggtgaactggagctgaatgaggatactgttttgattacagagttgtttgtgcttgttaaagattaaaaaagcctgcggggcaagaaccccgcaggcttttcattaaccagaaatggttgcgttttgttctgttttcgattgggacataacagtttctgctttcgcaggattaaacatgccttcccatttagacatcacaacggcagcaagcgcgttaccagtcaggttgacaactgtacgtgccatatccatgatgcggtctacgccggcaataaaggcaagtccttcagccggaacgccgatggtgccaagcgttgcaagcaagacaacaaaagaagtaccaggcacggcagccatccctttagatgtcaccattaagacgagcacaagcgtaatttggtgccaaatcgtcaaatcaatgccatatacctgtgctaaaaagagtgcggcaatagattgatagagaacggaaccgtctaagttaaacgtgtaaccgatcggaatgacaaatgaaacaatgccttttggacatccgattttctccattttttccatgatacgaggaagaaccgtttcagagctggacgtactgaacgccagtaagatttcgtccttcatgtaagcaaggaacttgaagatgctgatgccggcaatttttgcgacaatcccgaaaataacaattaagaagaaagcaagcgcgacataaaccaatccgacaagctttccgagagagataagagaaccgagtccgaatttagacacagtcactccgataagagcgaaaacgccgaatggcgccactttcatcacaaggtttacaacgtggaacatggcatgggatacaccttcaaaaaaggctaatacaggcttgcctctttcaccgatcgcggaaatacccaatgcaaatagtactgtaaagcagatgatggctagaagatccccttcgaccaatgactggaagaagtttgtcggcacaatatggaggaacgtttccgccactgatttattactttgttctttttcagtttcaacatattgactgatgtccgatttttgagcttcgtgtatattaactcctgtacccggatggaagatgtttgcaagggctagtccgagaataatggcaaaagtcgtgatgatctcgaagtacagaatcgttctgaagcctaatttaccgacttgctttccatttcctgcaccggctacaccgatgattaagctggagacaacaataggaatcactatcattttgattaagcgtaaaaagagatccccgattggctgcaggtaagtaggcaatgctgggttgccataccaaatgacgccaacaatgacacctagaataagtccaacgaatatttgtgtggctaatccaaacttaattcttttcatagattacctcccaaaaaacaaagtatcaacatatatcatgaatagacatatatttaatctcactattagatcaaattataatagataagaaatcaattcgtctatagtaaattatatttcgaaaataaagaatattcaatgacattatgataatcaccagaattatctaaaaacaggtgagctttgacctaacctgactattatttcaaaattaagagatatgtgaaaaaataagaaaatcccacgcgtaaggcgcgggattttcgctcattacaaatcgtttacttttatacagtcattgcagatattaccataacactcatgctgctcttctatcttttttccgcattccgcacactttttcgaaggcaggtttctaaaaaattctgtgattttccccagcataaccaatccctctttcccctttgtagtgatttcattgtaatataacagatcgcaaaaatcaataactgttttgatacaatgtttaaaacatgcttttttcaagaaaaatgggtatattgaaggaggatcaattttttttgaaaagataggaggacattatgaaagttacagttatcggatgctatggcggttttccggccgcaaatgaagcgacgtcaggctatttgtttcagtcaggtgattactctctgcttgttgattgcggcagtgccgttttgtctaagctgttcggatatgtgccggcggaaaagctggatgcggtcgttctgtctcattatcaccatgaccatatcgctgatatcgggccgctgcaatttgccaagcaagtcggttcgtttctcggcaaaggagagcatacgcttccgatttacggacatgatgctgatatagaacagtttcaaaagcttacatataaaacacatacaaaagggatcgcctatcagccggatcagccgttgactgccggtccgtttacgatcacctttttaaaaacgattcacccggtgacgtgctatgccatgcggattactgacggcagccacactgtcgtttatactgctgattccagctatcaggattcatttataccgttttcgaaagatgctgatttattgatctcagaatgcaatttttatgccgatcaagacggaacaagtgcaggccatatgaacagcctggaagccggacgcattgcaaaagaagccggagcgggagaactgctgctgacacatttgccgcattttggcgtgcatgacaatcttcgcaaagaagcgaaaaccgtttttaacggagaagtgaatattgcgaaatcaggttttgtgtgggaaggataaaggaggagcaccatgttatttatagacaatcaaaatatcaatgatccgcggatcaatcttgctatcgaggagtactgcgtaaagcatttagaccctgaacagcaatatttgctcttttatgtgaatcaaccgtctattatcattgggaaaaaccaaaatacaatagaagaaatcaatacaaaatatgtagaggaaaacgggattatcgtcgtccgccgtttatcaggcgggggcgctgtgtaccatgatctggggaacttgaacttcagctttattaccaaggatgacggggacagctttcataactttaaaaaattcactgagccggtgattcaggcgttacatcagcttggggttgaagctgaattaagcggccggaacgacattgtagtggatggccggaaaatatccggaaacgctcagtttgcaacgaaaggccgtattttcagccacggcaccctcatgtttgattcagccattgatcatgttgtatcagcattaaaggtgaaaaaggataaaattgaatcaaaaggcatcaaatcgatcagaagccgagtagcaaacatcagtgagtttctcgatgataaaatgaccaccgaagaattccgcagccatttgcttcgccatatttttaacacaaacgacattggaaacgtgccggagtataagctgacggaaaaagattgggagaccattcatcaaatttcgaaagagcgctatcagaattgggattggaactacggccgctcgccgaaatttaaccttaatcattcgaaacgttatccggttggatcgatcgatttgcgcctagaggtcaagacaggcaaaatcgaggactgcaaaatcttcggagatttcttcggtgtcggtgatgtatctgaaattgaaaacctgctggtcggaaaacaatacgaacgcagcgtcatcgctgatgtgctcgaaggtgtgaatctcaagcattactttgggaacattacgaaagaggatttccttgatctgatttattaaggcaaaacacatcgtttgaaagagcggttgtgtttttgaaataatggaggcaggagggattcacatgaaagtgtttttaatcggagcgaacggacaaatcgggcaaagactcgtctctttattccaagataatcctgatcattccatcagagcgatggtcagaaaagaagaacagaaagcgtctcttgaagctgccggtgcagaagctgtgcttgcgaatctggagggcagcccggaagaaatcgccgctgcggcaaaaggctgtgacgcgatcattttcacagccggttccggtggcagcacaggctatgataaaacactgctggtggatctcgatggagcggcgaaagccattgaagctgcggacattgccggaatcaaacggtttattatggtcagcgccctgcaagcccataaccgtgaaaattggaatgaggcactcaagccttattatgtggccaagcattatgctgataaaattctggaagcgagcggtttaacctatacgattatccgtccgggaggccttcgcaatgagcctggaacgggaactgtttcagcagcgaaggatctggagcggggatttatttcccgtgatgacgttgcaaaaacggtcattgcctctttagatgagaagaatacggaaaatcgggcctttgatctgacagaaggagatatgccgattgccgaagcattgaagaaactatgacagtactgacactcagggctttttgctcttgagtgtttttttctgtttctctataatggaggagaaagcttggcttcaataatgaatgactattcattcactttaaggggtgggagaatgaatcttgtttcaaaattggaagaaacagcatctgagaagcccgacagcatcgcatgcaggtttaaagatcacatgatgacgtatcaagagctgaatgaatatattcagcgatttgcggacggccttcaggaagccggtatggagaaaggggaccatctagctttgctgcttggcaattcgcctgattttatcatcgcgttttttggcgctttaaaagctgggatcgtggttgttcccatcaatccgttgtacacgccgacagaaattggttatatgctgacaaatggtgatgtaaaggcaatcgtgggcgttagccagcttttgccgctttatgagagcatgcatgaatcgctgccaaaggttgagctcgtcattttatgccagacgggggaggccgagccggaagcggcggatccagaggtcaggatgaaaatgacaacgtttgcaaaaatattgcggccgacatctgtcgctaaacaaaatcaagaacttgtccctgatgataccgcggttattttatatacgtcaggaacgactggaaaaccgaaaggcgcgatgctgactcatcagaatttgtacagcaatgccaacgatgttgcaggctatttgggaatggatgagagggacaatgtggtctgcgctcttcccatgtttcacgtgttttgtttaaccgtctgcatgaatgcaccgctgatgagcggcgcaactgtcttgattgagcctcaattcagtccggcatctgtttttaagcttgttaagcagcagcaggcgaccatttttgccggtgtgcctacaatgtataactacttgtttcagcatgaaaacggaaagaaagatgatttttcttccatccggctgtgcatttcgggaggcgcggccatgccagtcgcgttgctgacggcgtttgaagaaaaattcggtgttaccattttggaaggctacgggctctcggaagcatcacccgtcacgtgctttaacccatttgacaggggcagaaaaccgggctccatcgggacaagtatcttacatgtcgaaaacaaggtcgtagatccgctcggacgcgagctgcccgctcaccaggtcggcgaattgatcgtgaaaggccccaatgtgatgaagggctattataaaatgccgatggaaacagagcatgcattaaaagacgggtggctttatacgggggacttggcaagacgggatgaggacggctatttttacattgttgaccggaaaaaagacatgatcattgtaggaggatacaatgtgtatccgcgggaggtagaggaggtgctgtacagccatccggacgtcaaggaggcggttgtcatcggcgtgccggacccccaaagcggggaagcggtaaagggatatgtggtgccgaaacgctctggggtaacagaggaggacatcatgcagcactgtgaaaagcatctggcaaaatacaagcggcctgccgccattacgtttcttgacgatattccgaaaaatgcgacggggaaaatgctcagacgggcactgagagatattttgccccaataaaatgaaaaagcgaagcggttagcttcgctttttcattttcaatcctttgcttcttttttaataatatttagcagcgcctttgtatcatttttgcttaatttgtagtatgtgccatccttcaaaaaaacggcttgctggctgccgtcaatccatagtctgaatgagtcataccggtctttatgaaacttgattgtcccttcgtaatcaggggctgatgttttttctgtcttcacctgttttccctgattcataatatccagcatatctttgacgtgctgtcttttttcaatctcgatatcttcctggccgcttgaagacagtgtgatcaaatccgcgtctaccgattgatacacatcgcctgatcggctgtaaagataaaaaaatgcgataaacacaagaccgattaccacgatggctgccactatttttttcatttgcatcactccaaacattgttagttttcccagcgatcgggctttccatgcttaaaagggtggaaaagtgcggaacacagcttggttctaagaatttgaatttatgattacaatagaagtaacgggttgatgtgaggagtgaggcgttatgcgcaagtggattgcggcagcaggacttgcttacgtgctgtacgggctgtttttttattggtattttttcctgtcgggtgattccgcaataccggaagccgtgaaagggacgcaggctgatccggcttctttcatgaagccgtctgagttggcagtggccgagcagtattcgaatgtcaagaattttttattttttatcggggtaccacttgattggtttctgttttttgttctgcttgtcagcggtgtttcaaagaaaatcaagaaatggatcgaagcggccgtgccttttcggtttttgcagaccgttggttttgtgtttgtgctttcgctgattacaacattggtgacgctgcctttagattggataggctatcaagtatcgcttgactataacatttccacacagacaacggccagctgggctaaggatcaggttatcagcttttggatcagctttccaatctttacgctttgcgttctcgttttttattggctgatcaaaaggcatgaaaaaaaatggtggttatacgcctggctgttaacagtgccgttttcgctgtttctgttttttattcagccggtcattatcgatcctttatacaatgatttttatccgctgaaaaacaaagagcttgaaagcaaaattttagagctggcagatgaagccaatattccggctgaccatgtatatgaagtgaacatgtcagaaaaaacaaatgcgctgaatgcctatgttacaggaattggggccaataaacggattgtattgtgggatacgacgctgaacaaacttgacgattcagaaatcctgtttattatgggccatgaaatgggccattatgtcatgaagcacgtttacatcggtctggctggttatttgctcgtgtcgctcgccggattttatgtcattgataagctttacaagcggacggttcgcctaacccgcagcatgtttcatttagaaggacggcatgatcttgcggcacttccgctgttattgcttttgttttctgttttgagctttgcggtgacgcctttttctaatgctgtctcgcgttatcaggagaataaggctgaccagtatgggatcgagttgacagagaacagagaagccgctgttaaaacgtttcaggatttggccgtgacggggctgagccaggttgatcctccggtgcttgtgaagattttcagaggcagccatccttcgatcatggaacggattcaacatgcggagaaagaagagaatgcgccggaacatcaggatgctgacaaataaaaagaagcaggtatggaggaacctgcttctttttactattattgtgcagctgcttgtacgttgattaacccttttccatagtagaaagagtttccaagatatgttgcagtgctttctaaacgatcacggacttgcgcgtttgtccaagtcgggtgcttagaaagaattagcgctgctgctccggcaacgtgaggagtcgccatggacgtgccgttgtaagcaccgtaagtgcctccaggaagtgtgctttggatggatacgccaggagccatcacatcaagctcagaacctgcgcttgagaatgaagctctttggttgctgctgtttaccgcacctaccgcaatagtagaaggatattttgcagggtagccgactgtgcttgagcttccggacgaaccttcgtttccggcagcggcagcaacgacgataccgctggaaacggctttatcaacgactgttttcagcgctgtagaaccagaaggtccgccaaggctcatgttaataacatccatattgttggaaatggcccattcaatgccgttaataatccagctatattggccgcttcctgttgaatcaagcacttttactgcatataatgatgcgcttggcgctacgcccagaacaccgattgagttattaagagcggcaatcgtaccggctacatgcgtaccgtgagaactgccgtcctggtatgggtttgtttcagaaggtacgaagcttgctccgcctctgacgtttaagtcaggatgagaagagtcaattccgctgtcgataacagctacttttacgttagagcctgtgtagccttgagagtgaagagccggcgctttaatttgagaaatgccataaggaacagattgcgcatattcatgtgcaatatgatcttcttccacatatgcaacgctcggatcttttttcaattcttttacagctttttcatccaatgttgctgcggccgcgttaacatacttaaattgcttttgaacctttccgcctttttcagaaataacatcctttttcttggcggaactcatggcactcattgtctgtttaaatccgacaatgtatttcttttctgtactgctttttccggcagcctgcgcagacatgttgctgaacgccatcgtaaagattaacgttaacgcaaacaacaagctgatccacaattttttgcttctcactctttaccctctccttttaaaaaaaattcagagtagacttacttaaaagactattctgtgaatttattgtaatagatggaataatattttagtagacccatttttttgagatgattttatctctatttaggtatatcatctctcgctatttccgtagagactcgaaataactattttcatacagaaaagaacgaaaatagacatgagtaaatgttcattatgctgaaatgtcatgcttttttaggttaaatgctcctgagtcccggcaaatttctgtcgaaaaaattcgttcaaatgacctgcgtgtgcttccgtgagaacaatggatattatcgtgatattttttcaaagcatgatgataaaagtattctgaaaaataaactttacagaaaagggatagaatgaaaaaattattgagagggaggaagaaataagatgaacattcgccaagcaaagacatcagatacggccgccattgcgccgttgtttaaccaatatcgggaattttatagacaggcatccgatttgcaaggggcagaggcttttttgaaagctcgtttggaaaatcacgagtctgttattttgatagcagaagaaaatggagaattcataggctttacccagctctatccaacgttttcttctgtgtcaatgaaaaggatatacatattaaatgacttatttgtcgttcctcatgcacgtacaaagggagccggctgccggctgctttctgccgcaaaggattatgcagaggaaaacggggcaaaatgtttaacacttcagactgagcaccacaaccggaaggcaagaagcttgtatgagcaaaacggctatgaagaggataccggatttgtccattattgtctcaatgtgccggcgaagtgaaaatggcggcttgatgatttggttttttgaacgttcttcggttacgatataaatgaaaaggagtgtgccgaatgtcaacgttatttcaagccttgcaggcagaaaaaaatgccgatgatgtttcagtccatgtgaaaaccatatcaacagaggatttgccgaaggatggtgtcctgattaaagttgcttattccggcattaattacaaagatggtctggccggaaaagcaggaggcaatatcgtcagagagtatccgcttattttaggcattgatgctgcgggtacggtcgtctcttccaatgatccgcgttttgcggagggggatgaggtgatcgcgacaagctatgagctcggtgtctcccgtgatggcggattaagtgaatacgcttcggtgcctggtgactggctggtgcctttgccacagaatctttcgttaaaagaagcgatggtgtacggaacggcgggatttactgcggcgttatcagtgcatcggcttgaacagaacggtctgtctccggaaaaaggcagcgtgctagtcacaggagcaaccggcggtgtcggcggaattgcggtatcgatgctgaacaagcggggttatgatgtggtggcaagtaccggaaaccgggaggcggctgattatttgaaacagcttggtgcaagcgaagtaatcagcagggaagatgtctatgacggaacgcttaaggcgctgtccaagcagcaatggcagggagcggttgatccagtcggcggaaaacagcttgcctcgcttttaagcaaaattcaatacggcggatctgtcgcagtgagcggcttaaccggcggaggagaagttccggcaaccgtgtatccttttattcttcgcggagtaagcctgctcggaatcgattcagtatattgtccgatggacgtcagagccgctgtttgggagcgcatgtcttctgatctcaagcctgatcagctgctgaccatcgtggacagggaagtatcattggaagaaacgccgggtgcgttaaaagatattttgcaaaatcgcattcaaggaagagtgattgtgaagctttaacaggatcagcttgcagagaatgttatttttctgcaagcttttttgtggacaggatgatcagctgctgaactgctgtgtcgcgaaacaagattttcctgtaagccgaactttctcttctcattttaaaaataattggtgataatgattctcattccgtgttatactactcttggacatcttaaccatagaaactaccaacaggagagactggaacatatgaaaaaaacactgattattcttacagttttacttctttctgtcttaacggctgcttgctcgtcttcaagcggcaatcaaaacagtaaagaacataaagtggcggtaacacatgatttagggaagacaaatgtgcctgagcatccgaagcgggttgttgttcttgagctaggttttattgatacactgcttgatctcggcattacgcctgtcggggttgccgatgacaacaaagcgaagcagctgatcaacaaggatgtgctgaagaaaattgacggctacacatctgtcggcactcgctcacagccaagcatggaaaaaatcgcttcattaaaacccgatttaattattgctgacacgacccggcataagaaggtgtacgatcagctgaaaaaaatagcgccgacgattgcacttaataatttaaatgctgattatcaggatacaattgacgcttcgcttacgattgcaaaagcagtcggcaaggagaaggaaatggagaaaaagctgacggcgcatgaagaaaagcttagcgagacaaagcagaaaatcagcgcgaacagccagtccgtgcttttgatcggaaatacaaatgataccattatggccagggatgaaaacttctttacatcgagacttttaacacaggtcggctaccgatatgcaatcagtacgtcaggcaatagcgattcaagcaatggcggcgactctgtgaatatgaaaatgacactggagcagctgctgaaaacagatccggatgtgatcatcctgatgacaggaaaaacagatgacctcgacgccgacggtaaacgcccgatcgaaaagaatgtcctttggaaaaaactgaaggcagtgaaaaacgggcatgtataccacgtggatcgtgcggtgtggtctctgcgccgcagtgtagacggggcgaatgccattttggacgagcttcaaaaagagatgccggctgctaagaaataaaagaaaagacaggcaaacgcctgtctttttcttatttgataaagccggataagtggctgttgatattatagtcttttatccgccatttttcttctgcaaattcaatgttgctgaggcaggcgttgacgagacgggtgctttgaagctccgggtcaccgccggatatttctgtcagcagggcgtgaattgccgcaccgtgcgccacgatcagcaccttcttgtttggatacgcctgattcacttttgccaaaccgcccatcagcctgtcagtgagttcttctaaggtttccatattcggatagatgttatctggatagcgctttgtccgttcctccagcggcatgccctccgcgtcgccgtaatcgcgttccttaaaatcatccatctcgactatcggaagatgcagatattcattaataatttccgcggttcttttcgctcttttcagcgggctcgtcacaataatatcccaagaaaagtcctttacatattctccggtttctcttgcttggcgttcacctgttgcgtttagcgggatatcggttttgccttggcatttttgctgcaggttccaatcggtttctccatgtcttactaaacaaacggctgtcataaaatccccttcctgactttattcatatcgctattatactaaatcgaaagcgtgtgtcctatgaaaaagcctatgcaagaacttcaaataataaagcaagtccaattccgccgccgcttccgatggctgcaaccacatattgacagtctgtccgtcttttcgcttcataaaacaatctggttaccagagctgcacctgatgcaccgtacggatggccaagagctaaggcgccgccgcgcacattgatttttgaaaagggaatgccgagttcttgcgagcagacacaaattttgacggcaaaggcttcattgatttcaaataaaccgatatcctcaggtgttacatcgtgtgtatgtaagaggttacggatcgcatcaaccggtgccgcgggcggatagttggggtgaatcccactgactgcgctgccgataaaccggagcacaggcttaagtcccagggctgccgctttttcttcttccattaccaaaagagccgctgctccgtctgctatgccgctgctgttggctgctgtgactgttccggagctggtgtcgaaaaccggctttgcacggggaataatcgcttctattggccgcgttttcaaaaatgcttcgtccgtctccaattccccgagaggaacaatttcttcacggtaaaatcctccatcatgcgcgttcctgctgcgttgatggctgagaagggcgtactcatcctgcatgcttctgctgatggaatagcgtgcagccgtatattctgccgcaatgcccatgtctggatcgccgatggcatctggagaaaagcgggcccgttctgaaaaaggggattggctgctgctttctgagccgcccgcgatatacatcgtgccggctcccgcttgaataaggctgcaggcatagcgcacagcttcaaggccggagccgcactgtctgtcaattgtcattccgggaactgataaaggcagtccggcttgaagggctgacagtctggcgaggttgccgcctctgccggtagcgtttccgagaatgacctcgtcaacttgatcctctagctttcggctgagacagcggatgatgggagctgacaaatcctccggcaggaagggcttcagcagtccgttttgatttccaaagatcgttcgttttgcatcaacaataaccgcattcatttatactgtatactctcttccagccattttttcactctggaacgggcaatttttccgctgctcgtttccggcaagctgtctgcaaacacccattttttcggaattttataggaggctaatttctgtttacacaaggctttcagtgttctggcattagcgtttccatgaatgacagctacagcgatttctccccaatactcgtcgggaatgccaacgacagccgcgctttcaacctctgggcaggcgagaagcacacgttcaatttcttctgggaaaatatttaatcctccgtacacgatcatcccgttttctcttcctgatatgtatagaaagccctcttcatcaacatagcccatatcatccactgtcatccattcatctggtgtgctgccgttcacatagccggaaaaccgcatcgggctgttgacaaatatttttccgacttcgcctggctgacagcgttctccttcagcgttgcggatttcgatccggacattatgaaaagggcggcccgctgaatgcggtttccgtttgctgtcttccggtgaagaaaacgtcacaaaactaagctctgatgtgccgtaaaaatcgtacagcttgagatgaggccatgcagcggcaagcttctccttggattctgccggccagtctgcgccggatgaaatgattttgacgggactgtcgggaaaaccctcaatccttgtgagggcgtctgtcatcgtcggtacggtatagagaacactgatggattcacggcacagccattccttcgctttggcaggagaaaactttttcagcaaacaaacggttcctccgagaaacaaagtgctgactgccccgtataagaagtgagaggacattaacgtcccgggaatcaataccgtgtcatttgatgtaattgaaaaatctgtttctgtacaggtaaagctctctatccatgagcggtgagatcgcgtgaaggccttcggttttcctgtcgagcccgacgtaaatcccatataaaaagggtgctccggatcaatggtaggcaagggatcagcggttgcttcagaaatatctgccatacagttatccagcaaaacaacaggtgtctggctatctgtcagtttgtttttgaaaaaggctaaagtaaccacaagatccgcattgcttatggacagccgctccttacattcagccgggctccagcgtgtgtcgatgggaatggctgtgcaaccagccgctgcggctccggcaaacagctgtaaaaacgccagactatttgggagcaggatcgccacacgattcggcatgctcggctgtgaccgcagccaatttgcggtttgagagacaagccgatcccaatcctggtacgtgatttgctccgattcagtctggatcgctacacggccgggcgatgtttcggcagtagatgaataggtatgagtaattgtcatgtagtgtcatcctccttttgtaaacatcgtatcagaaagagacaaggcttgagtgatttttatcgccagaaatgcagatacagccgcttttatcaaatcaccaggcacatatgcaaggctcatgaaggcggcctgtgacaaatcaatatgcatgataaaagcttgtaccggtataccaagcagataaataaagatgatgccgaatacgatatgagtgaaaaagagacgcaatactgtcaccttccgcagcctgttagcggctaaactgatcagccatgaagcgaggggataagcaatcaaaaagcctgcgctcggtccgaaaaacacaccaaaaccgcctcgtccgccgggcaacagcggcgctccgaaggcgacgagcagcaaaaagacaagctggcttaagatagcagactttggcctgagaatgctgcctgccaacatgacaccaagcgtttgcaatgtaatcggaacgggtgtaaaggataagaagagagggggcataaagccgagcactgccatcagcgcggtgaaaatcgcaatatgcatcatgtcgattaatttcagcatgtgaaatcctccaaacagtaatcaaatatggttatacaataaatgccggtaattattatgtcaactgatttttgatttaagtttacataatgaacgcaaaaaaaccggccgtatggcagaccggtttttgatggttattcttctgtcaggatgacaagcgaatcaacggaagcggccacatgggaaacggcgcggctgacttcctgaagccctccaagaaaggcttgcagatcgacgtcgattttgcctgattgctctttgctgattttcatgctgtggacgatttcatcgaataagcggttaatttgcgtcattttttctttactttcgctgactagctcattcacgtctttgatatgcttggatacaatgttgatttgtgtattcgtattgttcacaagctcagaaacagtagagacggtttttttcgtgtcctcagaaagcttccgcacttcatttgccacgacagcaaagcctttgccgtgttctccggcgcgggcggattcaatagatgcattgagcgagagaaggtttgtttgttcagctatgcctgtgacgatgccgaagattttttcaatttgctgcgcgatttcatccagcttgaccatttctttttcgatttggacaaggcttgtgtcaattttgttcatctgtttttgctggacttctagctctttttttccgccgatcgacttttcttcaacagtgctggatgttacagtgccggctttggatgcttgagaaatgccttcagatttgtccacaagctcttgaactgatctgcttgtttctgaaaacagattggcaatcgatccagaggtttcttgaattttctgatgaagaaggtttttcttttcttcttgttcatcacgggtctggttgtactcgctttgaaacgcttcaaggacaagctgctgttctaagttcaagatttttgttgttgctttaatggcttttagcagttcttgctgatttgtaatggacgcttcataaatgtcaatcattgacaaaagaagctcttgaaacgcacccatataccattttggcaaaaggccgattcttaaatggatggaggcgattcggttacgcttttcaataaattcatcatcgataacgcctgcaaacatttcctgaatatgccgttttaacgtttgttttaagcggtcaactgagctgtgatcattaatgatatccatcaatgagctttcatggtcaaggtttttataaaacgcatcaacgatatttacgatattttcttgaatgagtggctgaagctgctctaacacgtaaagctcagcatctcccaacctgaccattttgagctgttttttgacatctgcatgtttgtttgtgagctgaatgcggtttttttgctgtccgtttgaatctgaaaagtaagctgtttcttgttttctgtcttttttaaataacaatacaatgatcccccttgggaaaaatataatttttactttttggctttttaagcctttttcttttttatcggccaagggaaacatgaatgaagctgcagatgaaaaatatttgaaaaaacgttcattaaaatgaacggtttaatcgagatctatttgttttaatggtttaatggccggaccctctacaacttcgccagatggcttaaagcgtgatccgtggcacggacaatcccacgtatgctcactgtcgttccactcgacctcgcagcctaaatgggtacaagtcgtatcaacgagatggaggcagcctgtctcatcacgaaatgctcccgctcgcctgccgtttatggtgacggctttcccttctcctggcgaaatgtcttcaaattggacatcaggcttttcaagctttccttttatcaaatgcttggcgacatctgcattgtaggaaatcactttctgcaacccgggattcagatggaaacgggacggcgtgaaaatgctttcgtatgggttttcttttttctccacaaggtctgacaataaagtggctgcgactgctgaggacgtcatgccccattttttgaacccggtcgctactagaatattgtcctcattttccgacatcggcccgataaacgggattttgtcgatcgtcactagatcttgggtggaccaataatatggaatgctttcgatgccgatggtgctttcggccagttgtctcagtgtttcataatgtgtagacatggcttttccctggcctgttttatggcttactccgctgaagagaatcagcttttcaccgtttacaaccgtatagcggagcgccactgacggctgatcgatactcaaatacatgccctcgggatactcgatcttcggcttgatggcaaggacataagatctgtcggagtacattctcgcagcatataatccgcctccgtcataaaaagggaagtgggaacagcatatgataaagcggctcttaatggcgtgccggctttttgttaccacttcgggcctttcgccttttttgatatcaagcgcaacggtctcttcataaattcggccgcctttttgaacaatttgctccagaagcgcttttaagtattgaagcggatgaaattgagcttgattcttcatgacaagcgccagcttagaacctaagggaattggaagatccttgataaggtctctttcaattccgagctttgtgtatgcctcatgctcggtgtggattttttgaacagcgttttcatttgccgtataaagatatgcgtcttgctcggtccattcacaatcaatttgatgttcatccacaatgccttttatgtaatcaattgcgttttggtttgcttcataataaagcctcgcatggtttaatccgaaatggcggataaattcgtcgtatatcatgtcatgctgtgcggtaactttagcagttgtatgcgcagtggttccgttaagaacctgatttgcttcaatcaaaacgacacggaagcctctcttcgtaagttcatatgccgttgtgattcccgtaatcccgcctccgataatggtgacgtcacattcagtgtcctcttgaagcgcaggaaaagaaggcaggtcagttgatgttttccagtatgtttcaggtgcttcctttgcaaaatgttgattagccaagccgttatacctccaatcagatttattcttaatttttccatattctatcttttcatacataggaagcaggcattgttcataacataataaggttgaaaaggagtgatttcattggcgaatcaaaaaaagaaaacattaccgcctcagcaccagaaccagcagcctggttttgaatatctgatggacccgcgtccggtttttgataagccgaagaaagcgaaaaaattagagggcaaaaccgctattattactggaggagacagcgggattggacgcgctgtctcggtgttattcgcaaaagaaggggctaatgtggtcattgtgtatttgaatgaacatcaggacgccgaggaaacaaagcagtatgtagaaaaggaaggggtaaaatgcctgctgattgcaggagatgtcggggatgaagcgttttgcaatgatgtggtcgggcaggcaagccaagtgtttccatccattgatatattggttaacaatgcagctgagcagcatgtccagcccagcattgaaaaaatcaccagccaccagctgatcagaaccttccaaacaaacattttttccatgttttacttaacaaaggcagtgctgcctcatttaaaaaaagggagctctattattaataccgcttcaattaccgcctataaaggcaataaaacgctgatcgattattcagcgacaaaaggcgcgatcgttacgtttacaaggtccctttcccagtcgcttgttcagcagggcatacgggtcaatgcagtggcaccgggtcccatttggacaccgcttatcccggccagctttgccgcaaaagacgtggaagtgtttggttcagacgtgccgatggaacgcccggggcagccggtcgaagtggcgccaagctatctataccttgccagcgacgattccacatacgtcacagggcagacgattcacgtcaatggcggaacaattgtgaacggataataaaaagccaatccttgaaggattggcttattcgctctgcttgagcgctgcatattctttagagagcgtaagaaacgcatctttatctttttcgtccaaggctttgttaatttggtccgtcagcatggcaagccgacggttatacaaggattcatcgagcaccatttgaatgtaaatatccgtcattgtgacatcgaattcttttgttttttgcgtgttgcgggacttcatgagctcagtgtacgattttttctctttcataaagaatccccccaatgccttttttatagtatatggataacggtcgaaaaaatcaataaatttttataatttttagacaactaatacttggcaatctatcgacatatcctgcaaaatgccgtaaaccggcaagtcttatgaaagtaaaatcggtttattactagtcatttagtaccgttaaatatcattaaaagatgattttatcttaaatgttaaaaaaacctgtcgttttacaaaaacagatgatagattattagtataaattttgcagaaaaaggatggaggccataatatgagtcagaaaacagacgcacctttagaatcgtatgaagtgaacggcgcaacaattgccgtgctgccagaagaaatagacggcaaaatctgttccagaattattgaaaaagattgcgtgttttatgtaaacatgaagccgctgcaaattgtcgacagaagctgccgattttttggatcaagctatgcgggaagaaaagcaggaacttatgaagtgacaaaaatttcacacaagccgccgatcatggtggacccttcgaaccaaatctttttattccctacactttcttcgacaagaccccaatgcggctggatttcccatgtgcatgtaaaagaattcaaagcgactgaattcgacgatacggaagtgacgttttcgaatgggaaaacgatggagctgccgatctcttataattcgttcgagaaccaggtatatcgaacagcgtggctcagaaccaaattccaagacagaatcgaccaccgcgtgccgaaaaggcaggaatttatgctgtacccgaaggaagagcggacgaagatgatttatgattttattttgcgtgagctcggggaacggtattagaaaaataggaaggagctgaccgaacagggcagctcctttcataaagctatgccgtcggaattcctccggtgatgccatatacctgagatgtcacatagcttgaattctctgaagctagaaatacataaacatcggccaattccactggctgcccagcgcgatttaatggagctggcggcgtgccttgtccgaatttcgggatgttttccgtcggctgtccgccggaaatttgcagcggtgtccaaattggtccgggcgcaactgaatttactctgatgcctttggaagcaagctgttttcccagtccgacggtaaagccgataatggcgtttttcgttgctgcgtaatctaacagcatcgggcttggattatagccttcaactgaggtagttgtaataattgaagctccctccggcaaatacggaagcgccgcttttacaacccagtaaagggaaaagacgttcacttcaaatgttttatagatttgttcagtaggcagatcttcgatgttttcgaccgcttgctgtttgcctgcaacgagcgctagcacatcaagtccgccgagttcgtgatgcgactgtttgactagatcttggcaaaaggattcgtcgctcaagtctccggggatcagcactgcttttcggccttctgcttcaatcagctcttttacctcttcagcatctggctgttcctcgggcaagtagttaatagccacatcggcaccttctctggcgtaagcaattgcggcagcgcggccgataccggaatcgccgcccgtgacaagcgcttttcgacccgttagtttacctgatcctttgtagcttttttctccgcaatcagggacaggtttcatgttcttttgcaggcctggcggttcttgatattgttcgggaaattcatcatgaaaaaatgcttttataggattcgtaagatttgaatcagacatcagcaacgctccttttctgtttggtgtacattcgtatgtgtacccctgagcataagcagaaaaacatgttttggcagtttgaatagtgaaggaaaaagaaaacaagaaaaaacaaagccttcttccatatttatcttgtcaaataagactatatgaattatgataaattcgagctataaatcaactaaatattgggtgttgggagagtgaatcgtcatgaaaaaagcggcggcggttttgctgtcactcggtctcgttttcggtttttcatacggagctggccatgtggcggaagccaaaacaaaggtgaaggtctataagaactgcaaggagctaaacaaagtatacaaaggcggagtggcccgcacatcgaaggtgaaaaacaaaggcggaaaaacgaagtacaagccttacgtttctaaggcgctttacgatgccaataaaaacaaagaccgcgataaagatcttatcgcctgtgaacggtaaataagaaaaagcaatctggtgtccagattgctttttctattgcttaagccgcctgatcggccgcagcgcttttcgccttccttgtcataaggctgactgccatcatgaccgtgatattcaaaagcagggcgacgatgccgacattcaagtcttttgcggcttgcggcagagccggaaataaagtgccgatcgtcgtttccgtcattgtaatataagtaactgctccgacacctgcaataatgccggcgaaagctccttgctttgtcaccatattatgcttgagcaggctgaacaaaagggcggggaatagctgtgtgacaaggctgtagcccatcaaaagcagcgtaacgatggtattcccgcctttgaaggtaaaatacaccgaaatcagcgcaatcaccggcactaaaaacttagcaagcgccgatacttgctgttctgtcgtgcggggcgcgattaccttgtacacattttttgcaaacagtgtggaggcggacattaagatcatagaccctggcacaagtgctgtcagcagtccggcagcaccgataattccgacaaaccaagggtcaaatgcttgcagagacagtctcaaaagcgacaaatccccgtctgcgccattcagatctggaacttgcaggatagccgcaaagccaacgaaaagaacgaagagcaggaccagctggtacaaaggcatgatgatggcgtttttacgaaacacttttgggttttcggctgaatacgaagcggaaaacgtgtgaggccacatgtaaaaaccaagcgctgtcaagagtacggttgaactgaaccaggccacactttgtcccgattcggggagcgtaagaaagccaggctttgccgtttcaatctgctgaaacatgtcttgaaatccgccgtagtaatgaattggcaaatacacacctaaaaacagaacgacaaccagaatcatgatgtccttcacaaccgatatccaggcagacccgtgaatgcctgaaaccataacataaaccgtgatggaaacagcgccgatccagatggcggcggtcggggtgattttgccgtacgaggtttccgatacaatcagcccgaggcctttcagctgcagtacaagatagggaatgagtgcggcgatgccgaccagtgaaacgagaatgccaagcagcggactgttgtatttttttgtgaaaaaatcagactgcgacattagtttatgctgtttcgcgtacgtccaaactgctggaagaagccagtaagaaaggatgtaggccagacatccgtaggcgatgatataaaaggctggaccgccctttccgtaggcccagccgctgccgccgagaaacgtaaaagtagtataaatttcgcctgccatcaaaaggaagacgaacacagttccgaagccgcgccctccaaccgtccactgctccaggttcatgtcttttcctttttgggcgcgtataccgagaaaaatactcaagagcaggacaccgaaaatgatgatgagagctgcattcattctgcttcctcctttttattttccttgtcgaggacatacacaatcgccatcagcgcagaggtcaaaagagcccacatcacaatataggcaagaataaacggcatgccgaacacgtagggggtcaccttatttgcaaaagggatgccgagtaagataccgataaagggcaaagcggcaagaacgtgaatcagtttcatagaatcctccttctatttaggattggggtgtacaagcccaagcgtactgaaaatgatgtcgcagatatggcagcacatgtcactttttagggtgaaaggctgtggttcgaattataaataaatttattttgtttgtatagtgtgaattgtctgaaattaatgctctgaatcgcccgaagagggaacgggcagtatgattcaaaaggctcggagtctgtccggggcaaatagatagtatgttaataattcgctgacctgctcacggattcgcggattaaaatagcgatggttttcttcataaccgtcgatgacaaatgtatagagcgtaaaggcttcatcgcgttccgtctcgcggattgcaatttttcttttcctcagttcttttctgacctccatcaaatccttttgtgctatttttaatgattcgctgataagctgtttataaggatgcttcaattttaatgtgctttcttcaattccggcgagatcacggttaaaaatcgtaatggccatgggcaaaaagagagcccgttcaattaaatcgtatatttcctcctgcagatttggcatgttgactccttctttctaagggaacgtttgttctatttgtattctatatcggctggtgaaatgtttcaagacagaaaaaatcaccaaaactttttagttttctgctgataatgtgtagaataaggatagacaaacccggtaaggagtataaatgttggagcattttttatcctatttgacacaagaacatttaactgaattatttcaaagctatagggctttcggtccgctcatagctgtgctgctgcctttaattgaagcatttctcccgtttttgccgctgatcgtgtttgtggtggcgaatacgaactcgtttggcttgtgggaaggattcatcctgtcttgggcgggatcaactgctggttccattctcgtatttttgattgtccgtcaatacggacagagaaaattgcttggatttatccgcagtcatccgtctgtaagaaagctgatgttatgggtggaaagacacggcttcggtcccatgtttcttctgctttgttttccatttacaccgtcagccgcggtgaatgttgttgccggtttgtcaaggatcggaacgcggccgtttattttggcggcagcctcggggaagcttgtcatgatttttatgatcagcttcatcggatatgatctgcacgcgctgattacacagccgattcgaacggtcatcgccgtattggtgatcactgtcttatggtatgtcggcaaaaaggtggagcggtatctgcatgtaagagccagtcagcgtgagcatgatggagggagacagtaacatgaaaaaacggttttggtttcttgccggtgtagtgtccgttgttctcgccattcaggttaaaaatgctgtctttattgattacaaggtagaaggcgtcagtatgaacccgaccttccaggaaggaaacgaattgttggtcaataaattttcgcatcgatttaaaaccatccatcgttttgacatcgtcctttttaaaggccctgatcataaagtgctgattaaacgggtaatcggcttgcccggtgaaacgatcaaatataaagatgatcagctgtatgtgaacggaaagcaggttgctgagccatttttgaagcatttgaaatctgtttctgccggcagccatgtaacgggtgatttttctttgaaagatgtgacgggaacaagcaaggtgccgaaaggaaaatattttgtcgttggagataatcgcatatacagcttcgacagccggcattttggtccgataagagaaaaaaatattgtcggtgtgatttctgatgccgaataaaaagacgctaatggaagaggcgtctttttgtatgccgtttggaaaaatgtgttgaagaaaaatttgtaaggagctataatcaaaattgttacctgtgtaacaaaatttatatattttttgattggaggtccgtttttattggtttttgttcgttttgtatgaaacaaaaggagtggtgaatgatgatgaaatatgaagcagtgattataggaggagggccggtcggatttatgctggcttctgagcttgcgatggccggagtgggaacatgtgtgattgaacggcttgaaaaacctgttccgcattccaaggcgttgacgctgcacccccgaacgctggagcttcttgagatgagagggattttagagcggttcgtatccaagggaagcaagatacctaccggacatttttcaatgctggatacccgtctggatttttcaggcttggatacgagctgtccttacacgcttttgctcccgcagtcaaaaacagaaaagcttcttgaagatcatgcacgaagcctgggaacagaggtgtttcggggtgccgaggcgctggcggttacggaaaacggggaagcggtccaaacaatttttaaggatcgggacggcagtgtacggacgatcacaagcaagtttgccgttggtgcagatggcgccggaagtaccgtccggaaacaggcaaaaattgagtttccgggaacagacagcactgtcaccgctgcgcttggggatgtggtgctcctttctccgccgccgtcaggcgtgctgtccctttgcacaaaagagggcggtgttatgattgttccgttatcttcagaccgataccgtgtcgttgtgatcagtccttatcgcacacaaatgccgaaagatgtgcctgtgactgagaaagagctgagagctgatctcctgcgaatttgcggaactgacttcggtttaacagacccttcgtggatgtcgcggttcgggaacgccgcgcgccaagcgaaacggtatcgggacggcagaatctttcttgcgggtgatgccgcgcatattcattttccagcgggcgggcaaggactgaatgtcggccttcaggatgcaatgaacctcgggtggaaactggcggcggccatcaaaggctctgcgccttcttggcttttggacagctaccatgacgagcggcatccggcagcggaagggctcctcagaaacacggaggcacagacaaagctgatcgatttcactcaagcaggcctccatttgcgaagcatgatgtcggagctgctggccttccctgatgtgaatcgatatgtagcagggcaaatttctgcactcgatgtcagatatgaagctgatcgtaccatgccgccgaatcgtttgaacggggcacggctccctgacatgaagctgattctttccgacggcagttcggaatggctgtacagctttctccaaaacgggtcattcgttttgctgtcattgaggcaggaagctgatgagcatatcgaagtgaaaggcttacgtacggtaaccgcctcgcttgcagaaccgaatgaaaagttgcgggatgtgcataccatattggttcgtcccgatggacatgtagcctgggcggtggatgcatcagcgcccgattgttccgaggtgattcaaaaagggatcagccgctggttttccgtcaccagccgagtataattcaattcgattgtttcatctgtaacaaaacggtatgatagaagaaacaatcgaatgaaaaaggatggaaaacccgatgaacacagatcatacgaaacgcaatctttttgaattgtatgcggagctcattcatcaacaggagaaatgggaggggcttattaaagcctttttatctgacgaattgaggaagctggatgtagagcacgggagtaaatctcaattgacgatgacagaaattcatgttctatcctgtgtcggggacaatgaaccaattaatgtcacgtcgatagcagaaaaaatgaatacgacaaaagcgactgtatcacgcatcagcacaaaattgctcggcgcaggcttccttcacagaacacagctcagcgataataaaaaggaggtctacttccgattgacgcctgctggaaaaaagctgcacagtttgcacaaatattatcatcagaaggctgaacagcgttttctgtcattttttgaccgctataccgaggaagagattctttttgcggaacggctgtttcgggatctggtgacaaaatggtatccgtcgtcagaagaaattgaaggggggcttcctagcatttttaaataaaaaacacgcactgaggtgcgtgtttttcgcttttttctatcttgttcaaggctgtaacgtaaatcagatttcatcttgaagaatgaaattcaagatgttctggaatttgcactgcttatacgatatgtctattagtatctttattttatacgttttttactgtgtttttgatgctttgttttcaaatgaaatagggtcttctgttttagttctcctaatctttacagaaatacctactagaatgaccgccatagttgtaaatattcccatggttaataagatcgtatcctgatttaaactccatccaattaagaaagagatgatcgctcctccgaaacttgccgaagcaataaataaacttgtaacttcgtcaacgtacttctgaataatgattgatgctagtgttaaagcaatgggaaatatgcccgctatacttaggccaatcaaaaatgtaccgcccaattgaagtattgggttacttatataagagaaagcaatcaacaaaacaattaaacaactacagctaaaaaggaggtatttagaaaaatcaagccttctacttacgaaaccaatcaatattcttcctatgatgatccctacccagaaaaaggagacacttataagactaatttgttcattgtcttggtttatcatgattgaaggtaaaaagttggcaaaatttgtttcaattccagcatataggaaagcgaaaaatacaaaaaagcctaattgctttgatttttttctatctcctataaagtattgaaatgctcctccatctggaaaggtcacttgttggttagcattcttagcgtactctcggttcttagacaagaaaattaaccaccctacgaataggacgaataaaaaggtgaatatacagtaatacggtaaaaaccagttattgatatctatgaaggaattaattaataatgggaaagataaagcgcctaatccaaagagaacttccagcttactcattttttctgcattactttcgaaattagcaataacaaatgaaccaactgtcgtttctaatgtgcctgccccatatcctaagagaaaagccattacaacaatataataccaatccttagttagaaaaaagatacttaacgctgcaagcattattgtcaaagctaaagtaagtgtcctaaaatgactgtatttcttaatcattaacggtgcgattaatactccgcttagaaatccggtaaactgaaagaagattatgaccgaaatatcatctgttgtcttgttaaaagactctaatagaaatggtgtcaaactccctgttgatatatggataatgcctactgtaaaaaagaaagcatatccaaataaatatgtccctcttaacattcattacacccctatatgaaaaagcaggaaaataaattcctgcttttttagtaacttctctcttcgaaatactagttgactgctgaaacagacattggttgagagttgctgtctttctcaaagaacatttctaatacttcctgagatctaaaaccatcactaaaagaagggatctcaacccaatcattctgagttgatgcaatccaattgattaactcgcttctaaaagaatcagcccatccataaaactcgtttggcggatcgtttaataggctttgcggtactgggcagtctaccacgttcaagccatctatgagcttgtaaacgtgaggattacctgtgtggtatttaaactcttttttgtgtccaactacctcaatgctaaaaccacagtcttcaggtacagaacattttgatgtgatgatatttacaaataccttgttcttcagctggccataaatttctgcatagtcatctacgagtacctgtttatcctcttttgtttttacatttgtgttcatttttgccgttactgattctgtgatgaaatcactctcaaacaaataccataccatgtcaataaggtgaatacccagatcccccaatgatccactcgtcttcttactgttagcgtcatctctccaagtaaacttcttacgcctaagtgcactatttttcttgaagtgtacttttatggacagtatgttacctagttcattattgataattaagctttttaagatatttacgtaagataaatatctataattaaatcccatactggctcttacgctcaacctttcagcagtatctttcattatgcttgcttcttcaagagaaatagccataggcttttcacacaaaacatgcttatgttttcctaatgcttgcaaagcatgttctttatggcaaaagtttggtgatgctacaattaaaccttctgaggcatcaattagttcatctacgttttcaaatgacttcccgccgaaagttttcacaaagctttccgcattttgttgatttatgtcatatacccctactaactctgcattttttattgtagataaagcagttgcatgcgctcttgcaataccacctgcacctatgatgcctatcttcttcatttttatttcctcctcatgatccaattaatttttttaaggtattagtaattccttttgagtactcactatcagttataaggtggtgcaagttttttgcttcctgtgttgcattttttagcagatatccattccctactgtctgtaacatacgaacatcatttccactatccccaaatgcgatagctctttcggtatttaggttgtatttctctaacataaacgttacaatttcattctttcctgtccctgtggggataaaatctacatcatagctgtcttctggatcgcctgctaagggattacaccgatttatatttactgaaacgccgtattcctcgcagattttttcaattgctaataggtttttcttgtcgtttatttcatcttgttcctgatagtagaagttatgcttataccgtgactttcctaattgagtttgaggattcaaaagaatgttatgattttcatgtagctgtttcacaagtttttcaaccttttctttactaaacccttcattaatgcgactgttccacttgttatcttgctgaccgaagttatgctctgaaaagtacgtaatttcagttccaagatcactagctataaaatgcggaaaatatctaaattttcctcttcccattttatcgagaatagattctatactgctcccagtaacccatccgattattagcttcccatctttacttttttgttctagatagtcttcgagttcatagatgtcttgttgcttttgttcgtcgattgtatgcggaaaatacgtttcatcaaaatcacaaaaaacaatatactgaggatgttcaaccgtggataacgttttatactccgatttcttgcttaataacatgaaacagtccctccattactctgtcttgttcttctaaagtaaatgacggatataaaggcaaatgcagtacctgactatgagccttttccgtatgaaccaattggagtcctgcatacttgtcctgtactaaaggagttttttgcatatgagacagtattggataatatacatctgtttgaacaccaaaatcttcatttaatttagtcatgatatctgcccgatcttctgttcttaccttaataggaaacagatgccatacatgatcttcacttaattctggtaattcaatatagcctttattctgcaactctgctaattgggtaatgtatctatccgccaagaacaatcttttgaagttgtttaatgaaaggtacttcattctctctaaaccaattgctgcctgtaaattgtccatttttgaattaaatccaaaattgatgactttcttattttttacatttacttcaaaaccgtgataactaaattgaatgcattttttagcgagttcttcattatcagttgctattgccccagccttgccacatacaccaaaattcttatagggattaaaacttaatgtagtgatgtctgcatactttcctaagtctgtcagtccaattccttggcaggcatcttcaattactttcaatttataacgatttgcgatttgacgaatatgctgcatgtctgaatgttttccgtataaatgcacaggtagaataaactttgtataaggagttattgcttcttcaattttgtcaggatcgatgcagaatgtttgtgggttaatatctacatagataggaacgcctcccaaagctaacacagcattttcagtagctgaaaagctattagccggcatgataacttcatcccctgggtttaatcctaaagccaataaacctatcataatagcatcggttccactgctggttgcaattacataccttttatgtaaatatgtagataaaactttttcgaattgctctaaataggaaccactcgtaaattttccagttggcaaaacttcagttaatgtatttaagatatcttccacttcatcattggttattaatctgtctacaggcaaaaaagggactttactgatttcacgatttttttgatagttgaaaagatcatgttcaatatctatcttttcttttaatacttgtttccaccgctcgtttacaatactgtcttcaataacaagttcttttccttgtacgtcaccttttaagtgttttaatagtgacatgttttctttgcttttacctgaaatcttaacctgtttttgcatgaacagtacctccaatgattttataatctaaaaatttattacaaatttatcctagtttctgaaatcggtaacatgtcaacaacttttttaaggaagggaaaatatgcctacaattgatgaaatagcaaaattatgcaatgtgtctaaaaccacagtgtcaagagtattgaataatcatccttatgtgtcgaaagaaaaaagagatatgatcttaaaggctattaacgaacttgactacactcccaattatttagctcggaattttaggagaaataagacacaaacgatagctttatcggttccgagtatcgaccatccattttttgctcaattaataaaaggggtctctcatgaagcactgtttaagaattacaaggtaattgtatttcagaccttttatgacaaacagacggagctagaattactagagttattgaagcataaagaagtggatggcattattcttgggactttagaaaatgaatgggatcagatatcccctttcttaaagtatggtcctatcttattatgtaatgaatatcatcactcagcggacatcacgataattgggtatgatgaatttgaagctacatacatgggggtagtacatttaattgaaagagggcataaaaaaattgggttttgttttgatactccatatagcgaagctcaatgtcagaggaaagagggttatttgaaagctttacaagattacgatttacatcatagaagcgaatggatattcggcgaaatgtttaatatcgaggatggctttcgtgtttttcataagataaaggatctaaaggacagaccctcagcaatatttacaggaaatgatcaagtcgccgcagggattattaaacaggcgatgaaaaatggctttaaagttccagaagacttagctgtaattggttttgacaaccaattgatctgccaagtcgttactccgaccataacaacaattgatatccccgtaatagaattaggtcaacaggctgtgttgaaaatcatcgagtccatttcgggtaatgccactttaaacagaagaattattaaactgccaacaaagcttattataagagaatcaacgtaacgatagatttccctttatcattttatatctttatataagaaaaagaggttattcattttaacctctttttcaatcgtaagtcgtcaattatttctttcatttcaccctctggcagcattcacttcaaacctgatccattaacaacgaaatatccgcttatatttcctcatctcgatggtttgcgaattaaaagttcttgaacccttttttcaactaggcactactgccgctgattgagctctttttgtcttttttttcaccatgaagatggtgaagcaggcgataaaacggcggcagcagggcaataaccagaatgacgcgaatgacctgaaccgcaacgacaaaggtggaatcagcatgtaaggtaacagacgtcgtcgccatctctgcaatcccgccgggcgcaaatgccagaacagaagtgatgagcgaaattcctgtcagctcggaaacgatcacggcgctcaaaaacattgctgcgattaaaccgacggacgagacaaacccgacgatgataatacgggtgacgccggcaaacatgcttttatacatcttagagccgatcgttgccccgagaaatacttgtgatacatggttagcttgtgacggccaccatgccgtcatgtcgtgccctgtcaccgcagctccgccaacatgtacaattgctacaccgagcatgctgccgagcagccatggagctggaaattttaaaaatttcgcagctttgcaagctccccaggcagcgagaataagaatgacggtccacaaaacgggagcgagcctaaaatctgtcgttgcagaagaaatcgtctctgctgcggcacttgcggtacgatcttgttttgtatagatcagaatgactaaaaacggaatggaaagcaccacgagcagcacacgcatcatttgaacgaggctgactattgcggtattggcgcctacttcctgtgcgatgctcggcatggcggaaagcccgccgggagcggtgccgacaaagctagtcatcatatccgttttgctgaaacgccaaagcacatatcctgacagcatggccagcaggatagacaatatcagcataacgccgactgaaaaccaatggtctttgagaacagagagaacggataaattcagcttttggcccaattcaatgccgaggatcatctgcccgagggcgagccatcgtcggttaattcctttttggtctggtgccatcatcagccatgccggccgtatcatggcgaggcagcaggcgacaatcagtgttccgatcatccatccaattgatattccggttaatgaaagaataaaccccccggctgcactgattgcgataaaccatagatctttgaggagattttcgtctttcttcaatgtaaaacccttcttcctttttcacgtaacactccaattgttcacgtagtgaatgtatttattactatagtatatttttgttgataaagaaattatgaattattttctataagcgattcacttttcttatgaccttgtgttcgagcttttctattgtgtaagtcagagataaacccgctgtcagcagacacacggcaagagcgtaaaaaatcacttctccgccaaatgatgtcaggatcagcccgcctgccagcggtccgattgagcgggatatatcccaatgcagaccatagacagcataaaaccggcccagcaaatgaggcggcgccaatttcgatatgaaggtctggatgtgggttagcccgatgctttcgccaaccgtcatcaccgctgccgtcactaaaagcattgtcagggaggttgagcatgcaaaaccggcagccgcaagggagtagcaaatataagtaatgaaaaggattgttttcattgaaagcttttcggtccctttgacaagaggtacttgaagaacacagctgaataaagcttttgctgctgaatagatggtcagcatggacagataatcagaaaacatgtttttgctgaacagcctgtatgttgtttctgattgtgcatataacatgctgatggggagagaaagcagcaaaagaagcaggacaggcctgtatatcgtaaagctcgcggacattttcggggtaacagctgggtgtagcggctttgtctcaggcagtttcagtgcagcgatcagaaagtagataaacaatgccgcagcatctaatgcgaatatccacacggggttatgattgtacagcagcatccccactagcggtcctgccgtcagacccgctgaatagatcgcattgatgaccgcaaacacttccgaacgtctgctttccggcgtgctttcagcgatttgggcgcgggaagcgggaatgtacaacgatcttccgatgccattcatgacatagagaatagcgaaaacatacgcatgctcagcaaatataaaccctgtcattgccgctgattgaagaagcaatgcggtcaaaatcgctgtgcgccgcccaatccggtccgccgcctttcctgcagcgagcgtcaggaaaatatcagcaaatggctgaaggctgatgatcagcattggcatcatgatactgccgtttaattgttcatgcagatacagcaccataaaaggtcccatcattgcacctgtcaggcttgtcagcaattcgccgaaaaagcggagccgaacgggagcggtatatctcgattttatagagtgaaaactggtcaacatgtgatcgccgcctttcgctgtttgatatagtagtagtgtatagaaggggcggcggcccaaaaagtgaagaaaagaagagataaaagttccccttttgtcgggaggtgcggggattgaagctgatagagcactacgtggcgcttgtaaaaacaggctgcgccgagtatggacaaatgaacgaaatgacactcactgagattgccgactgtttattttgtacagaaagaaatgcaaagctcattttacataagctggagaacagcaattggattatccggaaaagcggggcggggcgcggccgcaaatctaaaatcgcgtttcttcggaggcctgaggaactgcttcttcaaactgcaaaggaatataccatgtcaggaaagcttaaaaaggcaaagaagctgcttcagcagtatcagtccgcgtttccggggcttcaaaacgaatataacatgtggctttcagaggtattcggatttgtgacggagacaggcgagaatggggcgaaggatgttctgcggctgttcatcacgcccgaatctgtcagcagtttggatccatgccaaatatttttgcggtctgagggccatttcgtcaaacagatatttgatacactcttcacgtttgattcggatatgcaggagccaaagcctcatttggttcatggatgggaagaggtcgaaaaaaaacaatggagattttttcttcgaaaaggtgtgtcatttcataatggacagccgctgacatcgcgggacgttgcgtttacgtttcagcgctttttggaactgggtgacaacccgtataaatggcttctgcacggagtgaaacaagtcttagaaaagggcccttattgtgtggcgctcatactcgataggccgaatgcgcttttgccgtatgctctttgtgatgaacggctgtccatactgccggcagaacagggcggcgggaaaaatggaacagggccttttcaggtgaatcagcaacacagcgggatgcttgtgcttgaagccaatgagcgctacttcaagggacgcccctatttggatcgcgttgagtttgtgttttctgagcaagccggagagatgaacggttttaccattcaagaaaaacaaacatgtcctgagcagcaaactgtttttgatgagcggcatgttcagtatttgtcgctcaatctgaaaaagaaggggcctcttcagcaccaaagctttagaaaagcgctccggctgctgatttcctctgaacggctcgttcgtgaagcgggagggcaccgaagaatcccggttacgtcctttttgcatccgagttcttttgagtgggagggcgtttcgccatctgaattgttgaagaaaagcggttacgagggcgaaacaatcgtgctttataccttttcggaaacggatcatcgtgaggacgccgaatggattcaaaatatttgcgcccagcacggtatcaggcttacacttcaattctgtgatgctgctgatctgcgacggccggaaaccgtgcagatggcggatatcattcatgacagtgcgacgttttatcaagacagcgagtttggttttctgcatttgctgctgtcggagaacagtttcttgtatcagcatctatctgaaaagctgacacagatttgctcaggaatgatagagcggatgttttccatgcctgatcgctgttcgagaatcaacatcctgcgtgacattgaccggcagatgatacaggagctgaacgcgatcccgctgtatcaaaatgtgctccaggtgacatcaagtaaaaatgtaaaaggcctggtgcttgatgaagagggatggattgatttgtactccgtatggctgtccaaataaaaagagggttcttttttgaaccctcttttttaaactgccatgctgcggcattgttcagcacaggcgaagcaggctttcgcacatgcttggcaatgatcatgatcgtgctttccgcattcagtgccgcatgcttcacaaatatcggcgcaaagtgcacaaatttctttcataaacgggctgtccgtttgcatggctttgaccgccagcgcgcaaatatccgcgcattccctgtcaagccggatgcagccgctgagatgatgctgcacgctttcttgcaagcatttagtgaaacaatgattgcaagccttcatgcaatcgatgcaagcctcaatacaagcttcagaatattgctccatggttgattccccctgtatgacagtatatggttttatgtttcccggctgcatttgaaaaaaacaggggagtgtgtttttagctaaggggatatgtacatataccctgaacgggtatatctaaccatcagatagtataggaaccagacagcgtgattttgttcatcacgtgctgcgcgcgtaaagacgcctttcgcttttaagtttgacgtttcctcggccgcacgcaagtaaaagtcgacggtttcttgttcatctttaaaagcggcatccagtcctcttgtgaaattgtccgggcattcttccgtttgtttcggcatgatgtgtttgccggtaattgaaccatacagtgtggaaaattcacggaggtggcgaatctcgtcacgcctgatttcttcaatctgttttctgacctcatcgctgtgggcgagttcggcgagcttgcggtagcattgaatggcactgaattctccgttgatggccttctgcaaatttcgaatcaaaacaggatcttccctgtatggcaccggatagggatagtagctgtaatgcaaggggattcaactccattcttaggaattgggcttctgtaaaagtatatgttgggcagggagagatgtgcggagataatcagctttttatatgtgaaaaggccgtttttaccaatagatcagattggtcattttcgtcaacattcgataaaatatatagagataaaaagagaggggtcttctaatttgggagcagagtttttagtaggcaggtccgggagtggaaaaacgaagctgatcatcgacagcattcaggatgaattgcgccgggctccattcgggaagccgatcatttttctagtcccggatcaaatgacgtttttaatggaatacgagcttgctaaaacgccagatatgggcgggatgatacgcgctcaagtgttcagtttttcacgattggcctggcgcatcctccagcatacgggaggaatgagcaggccgtttctgacgagcaccggcgtacaaatgctcctgcggaagctcatagaggagcataaacaggagttcaaagtctatcaaaaagcgagtgacaaaagcgggtttaccgcacaggttgagcggatgctgacagagtttaagcgctattgtctggaaccggaggatatccgccggatggcggaaagcggaacggcttccgagtatcgcggagaacgtgttttatctgaaaagctccatgacttatcaattctgtatcagcaaatggaaaaaagcctcgcagatcaatatcttcactctgaggattatttgacattgctggcagagcatatcccgcttgcggaagatataaaaggcgcccatatctatgtggatggcttttatcagtttaccccgcaggaattcagggtgttggagcagcttatggttcatgcggagcatatcacgttttcgctcacagcggacaagccgtcatatgagcgggagccgcatgaactggaattgttcagaatgacggggaaaacctattaccgcctgcatcagaaggcgaaggaactgaatttggacattacgtataaagagctgagcgggactgagcggcatacaaagacgccggaattggcgcatctagaggcacagtatgaagcgcgtccggccattccatacgcagaaaaacaagaagcccttactgtgatgcaggccgcaaacagacgagctgagctggaaggcattgctcgggaaattcacgccctagtcagagagaagggatatcgctataaggatgtagcaattcttgcgcgccagccggaagactacaaggatatggtgaaggaagttttcgcagattacgagattccttatttcattgacggaaaagcatctatgctgaaccatccgttaattgaatttatccggtcgagccttgatgttctgaaagggaattggcgttatgaagcggtgtttcgctgcgtgaaaaccgaactgctattcccgctcaatgaaccgaaggccaaagtgagagaacaggtcgatcagctcgaaaattactgtatcgcctatggtattaaaggcgaccgctggacaaagggcgatcggttccaatacaggcgttttgtgtcattggatgatgattttgcgcagactgatcaggaaatcgaaatggaaaacatgttgaatgacacccgcgattggattgttccgccgctttttcagcttcaaaaacgcatgaaaaaagcgaagacggttcaagagaaggcggaggcgctctatcgttatttagaagagacggatgtgccgctgaagctggatcaggaaaggcagcgtgctgaggatgacggcagaattattgaagcgcagcaacatcagcaggcgtgggacgcagtcattcagctgcttgaggagtttgttgaaatgatgggagatgatgagatttctcttgatttgtttcagcaaatgatagaagccggcgcggagtcgcttacattttctctaattccgcctgcgcttgaccaggtgtttgtcggcaatatggatttgtccagaatgtatggcacctcctgcacctttgtgctcggggcaaacgacggcgttctgccggcacgccctgatgaaaacggggtcctgtcggatgacgaccgggaatggctgaaaacgattggggttgagctatcctcaggcggacgagagcgtttgcttgatgagcacttcctcatctacatggcgttttcaagtccgtctgaccggctttacgtatcgtatccgattgctgatgcagaaggaaaaacgcttttgccgtcgatgatcgttaagcggctggaagaactgtttccgcatcataaggagcgcctgttaacaaatgaacctgaacaggtcagcgatgaggaacagctgatgtatgtcgtgaataaaagcgtggcacagtcctttaccgcgagccagctcaggttatggacacgggaatacgacatcagcgacgtctggtggagcacgtacaatgtgctgatgagtgagccggacaggctgcagtcgaaaaagctgttctcaagcctgtttttccggaatgaagtgaagcagcttgaacgcagcgtgtcgagacagctctatggtgaacgcattcagggcagtgtatcgagaatggaaacctttaacgcatgcccgttttcccattttgcgtcacacgggctgcatttgaaggaacggcaattcttcaagcttgaagcaccggatatcggccagctgtttcattccagcttaaagctgatttctgataggctgcgtgagcaaaagctggattggcgcgatttaacgaaggagcagtgcgagctgttttcctatgatgcggtagagcggctggcaccgaaactgcaaaaggaaattctgctcagctcaaaccggcattattatgtgaaggaaaaactgcaaaaaattgtgacacgtgtgtccggcattttaagcgagcatgcgaaagcgagcggattcgtaccgatcgggcttgaactgggctttggaggaaaagggccgcttccgccgctgacctttcaactgaaaaacggctgtacgatggaactcgtcgggcgaattgaccgtgttgataaggctgaaagctcaaaaggcctgctcctcaggattgtcgattataaatcaagcgacaaaggccttgacttagcggaagtatattacggattggcactgcaaatgctgacgtaccttgatttatcgattacacattcagctgactggctcgggatgagggcgacgcctgccggagtgctgtatttccatattcatgacccgatgattcaatctaatctcccgcttgggcttgacgagattgaacaggagatctttaagaaatttaaaatgaagggcttgctcctcggtgatcaggaagtggttcgcctcatggatacaacccttcaagagggacgttcaaatatcataaacgccggcttgaaaaaagacggctctctcagatcagactcagcagcagtcggtgaaaaggaatttgatcttttgacaaagcatgtgcgccgcaccttccaagaagcgggcgaacaaatcaccgacgggcgcgtatccattgagccgtacaaaatgaagaacaagacgccgtgcacatactgtgcgttcaaatcagtatgccaatttgatgaatcactggaagaaaacgagtatcgcccattaaaggctgaaaaggacaagacaatacttgagtggataaaaaaggaggcggatggcaatgaacattcctaaaccggcagacagcacatggacagatgaccaatggaatgccattgtttcaaccggccaggatattcttgtggcagcggctgcgggctctggtaaaaccgctgtgctcgttgaacgaatgattcggaaaatcaccgcggaggaaaacccaatagatgtagaccgtcttctcgttgtgacatttacaaacgcctcagcggcagagatgaagcaccgaatcgcagaagccttggaaaaagagcttgtacagcgccccggctcgctgcatattagacgccagctgtctcttttaaaccgggccagcatttcgacgctccattccttttgcctgcaagtgctgaagaaatattactacttgatcgatcttgatccgggctttcggatagctgatcagacggaaggcgagctgatcggggatgaagtgcttgacgagctgtttgaagacgaatacgcaaagggcgaaaaggcgttttttgagcttgttgaccgctatacgacagaccggcatgatctggatctgcaatttctcgttaaacaggtgtacgagtattcccgatcccatcccaacccggaggcgtggctggaaagctttgttcatttgtatgatgtatcagaaaagagcgccatcgaggagctgccgttttatcaatatgtcaaagaagatattgcaatggtgcttaacggggcgaaggaaaagctcttgcgcgcgcttgagctgacgaaagcgccgggcggcccggcgccgcgtgctgacaattttcttgatgatcttgctcagattgatgaactgattcagcatcaggacgatttcagtgaactatataagcgggtgcccgccgtctcttttaagcgtgccaaagcagtaaaaggggatgagttcgatccagcgctccttgatgaggcgacagatttgaggaacggcgcaaaaaaactgcttgaaaagctcaaaaccgactacttcacgcgaagtcctgaacagcacttgaaaagcctagccgagatgaagcctgtcattgaaacgctcgtacagcttgtcatcagctatggaaaacgattcgaagctgcgaaacaggaaaaatcaatcatcgatttttcggatttggagcattactgtttagcgattttgacagctgagaatgacaaaggtgaacgtgagccgagcgaggctgcaaggttttatcaggaacagtttcatgaggtgctcgttgacgaatatcaggataccaacctcgtgcaggaatcgattctgcagctcgtcacaagcggtccggaggagactggtaacctgtttatggtaggagatgtcaaacagtcgatttatcgattcaggcttgcggagccgcttcttttcctctctaaatacaaacggtttacagagagcggagaaggcacggggcggaaaatcgatttaaataaaaatttccgaagccgggctgatattttagacagcacaaactttttatttaaacagctgatgggcggcaaaatcggtgaggtcgattatgacgagcaggctgagctgaagcttggtgcagcgtatccggacaatgacgagacggaaacagagctgctgctgatcgacaacgcagaagatacggatgcaagcgaggaagcagaagagcttgaaacggtgcagtttgaggcaaaagccatcgctaaggaaattcgtaagctgatttcatcgccgtttaaggtgtatgacggaaaaaagaaaacacatcgcaatattcaataccgagatatcgtgattttgctccgttcgatgccgtgggctccgcaaatcatggaggagctgagagcacagggcataccggtttacgccaatttaacgtcaggctatttcgaagcggtcgaagtcgccgtcgcgctttctgtgctgaaggtgattgataatccgtatcaggatataccgcttgcctctgtgctgcgctcaccgattgtcggagcagatgaaaacgagctgtctttgatccggcttgaaaataaaaaagcgccgtactatgaggcgatgaaagactacctggctgctggtgaccggagcgatgagctttatcaaaagttaaatacgttttacggacatctgcaaaaatggcgcgcgttttcgaaaaaccactcagtatctgagctgatttgggaagtgtaccgcgacaccaaatatatggattatgtcggcggcatgccgggcggaaaacagcgccaggccaatttgcgtgttctttatgacagggcgcgtcaatatgaatcaacggcatttcgcggcttgttccgtttcctgcggtttatcgaacgcatgcaggagcggggcgatgatcttggtacggcgagagcgctcagcgagcaggaggatgttgtccgcttaatgacgatccacagcagcaaagggctcgaatttccagtcgtgtttgtagcaggtctcggccggaatttcaacatgatggatttgaacaaatcgtacctgctggataaggagctcggatttggcacgaagtatattcatccgcaattacgcatcagctatccgacacttccgctcattgcgatgaagaaaaaaatgcgcagggagctgctgtcagaggaattgcgtgtgctctatgttgcattaacgagagcgaaggaaaagctgtttctgattggctcatgtaaggatcatcagaaacagcttgcaaaatggcaggcatccgcgtcccaaactgattggcttctgccggaatttgaccgctatcaggcgagaacgtatctagatttcattgggccggctcttgccaggcacagagacttgggggatttggctggtgtgccagcacacgctgacatctcaggtcacccggctcgttttgccgttcaaatgatccattcctatgatttgcttgatgatgatctggaagaaagaatggaagaaaaaagcgagcgcctagaagcgatccgccgaggtgaaccagttcccggctcgtttgcgtttgatgaaaaagcccgcgagcagctgagctggacctacccgcatcaagaagtgacgcaaattcggacaaagcaatcagtttctgagatcaagagaaaaagagagtacgaggatgaatacagcggcagggcccctgtaaaaccggctgatggaagcattctgtacagacgtcccgcttttatgatgaaaaaaggcctgacagcggcagagaaagggactgccatgcatacggttatgcagcatatcccgctgtcacatgtgccgtcgatagaagaagctgagcagacggttcacaggctttatgaaaaagagcttctcactgaagaacaaaaagacgctattgatatagaagaaatcgtgcaatttttccatacagaaatcggcggacagctgatcggtgctaagtggaaggaccgggaaataccattcagcttagcgcttccggccaaggagatctatcctgatgcacacgaggcagatgagccgcttttagtgcagggtattattgactgtctctatgaaactgaggacggattatatctattggattataagtcggaccggattgagggcaaattccagcatggatttgaaggagcggccccgatcttgaagaaacgatatgaaacgcaaattcagctgtacacgaaggcagtggagcaaattgcaaaaacaaaggtaaagggatgtgcgctttatttctttgacggagggcacattctgacattatagcgagatccataagctccggaatttcaggcggagcgggtctcgttttctatataaaagagaggtgaaagcatttgcggattttacatacggctgactggcatcttggaaaaacgcttgaaggaagaagcaggctgagtgaacaggccgatgtgctggatgaactgaatacgattgtaaaggatgagcagatcgatgccattgtaatggcgggggatgcatttgacaccgtaaacccgccagctttagccgagcagctgttttatgaaagcctgtctgcgcttagcgacagaggaaagcgcccgatcgtcgtcattgccggaaatcacgataatcctgaccgtttgtccgccgcttcaccgctgacacatgaaaacggcattcatttaatcggttatccgacaacagagccgattcatattgaagtgccttcagcaggagagcttttggcggttggagcgctggcgtacccatctgaagcgcggttaaatgaagtgctatccgatacgtttgatgaaaagctgctccgtgatcactatgatgtgaaaatcaggcaggcgtttgagcatatgacaagccggttccggaccgatgcagtgaagattgccgccagccatatttatgtggcaggcggaaaccaaaccgattcagagcggccgattgaagtcggcggtgcatacacggtggctgctgaaagcctgccggcagatgccgcttacgttgcgctcggccatttgcatcgcccgcaaacgatcaagcgggcgcggacgcttgcgcgttattcaggatctccgctcgcctacagcttttctgaagcgggctacgctaaatcagtgacgattgtggacgcaaagcctggggaagaggccacttggcaagaggtgttattatcaagcggcaagccacttgtgaagtggaaagcggcaaatggattaagtgaggtgtacagctggctggatgaaggcagagatcagaatgcttggattgacttggaaatccgtgtcgcggaccagctgtcacttgaagagattcacaggctgcggaaggcgcacccgggctttatccatatcaggccggtttttgaagaacagaacaaagaccgggaacggatcgaggttaaacatgtctcaatcgaggaccgctttaagaaattttatgaaaaacaaactggcggtgcggtgccggatgaagaaatggtgaagctgtttttagagcttgcatcaggcgttgaagaggaggatgcgaaatgaagccgatcgccttaagcattaaggggctccacagctttagagaggagcagacgatagattttgaaggcctttccggtgccggtgttttcggcattttcggcccgacaggaagcggtaaatcctctatactcgacgcaatgacgcttgctttatacggaaaggtggaacgggcggcgaataatacgcacggaatcttaaatcacgccgaagatacgctgtctgtgtcctttacctttgcgcttcagacgaatcaccaaatctcatacaaagtcgagcgtgtgtttaagagaacggatgaaatgaaggtaaaaacggcactttgccgcttcatcgaaatcaaggacgagcatacggtgctggctgataaagccagcgaagtgaataaaagagtggaggagctcttagggctgacgatcgacgattttacgagagcggtggtgctgccccaagggaaatttgctgaatttctgtctttaaaaggggcagagcgcaggcatatgcttcagcgtttatttaatttggagcaatatggagacaggcttgtgaaaaagctgagacggcaggcgcaggaagccaatgcgagaaaaaatgaaatgcttgctgaacagtccggtctcggtgaggcgagctcagaggcagtggagcaggctgaaaaggttctcgaacaagctgaagcccggctggaagcgatgaggaagaaccgtgatcaggcgaaggagcggtttacagagcatcaggagatatggaatgtccaaaaggaaaaatccacttatgaagaagaggaaaaacgtctcgcagaagaacagccgcatatagacagcatgcaaaaacgcctgctggaagcagaaacagcagcagcccttaaaccctatgcggaccggtacgcagaagcgatccagcatgaggagcaagctgaaaaggaacaaacgctagcccaaaaggatttagcagaccggacagctttctttcagcaaaaacatgaagagtatgaagcgtggcgccagcataaaagcgagaaagagcctgagcttttaacagagcaggaacagctttcacgcttgcaggaaatcgaaatcaaactgagtgaggccaagcaagaggaagagcgcaaaaaggctgacctccggcagaaagaagcggctcttcaatctgtcatgaatgaattagaggccgtaacagaccgcctgacacgagggcaaaacagacagacagaattgaaacagcagctcaaatccctgcaggtgacatccgatgagcgaaaaagctgccagcaggccgcagaaatggcattgcgcatcagacaaaccgaggagcaaatcaaaaaagagaaaaaacgaagtgaagaattgaacctcgtgctgcagaagatgaatgaagagaagaatacactcgttcaaaagacggaagcggaagaaaacaacatcattcaggcatatgaggctgtacaaactgtgtaccatttggtgtgcgaaacggaacgctcattaacacatatgacggaagaggctagaaagagtcaacacacgcttcacttacagcgtgaaaaagcaagggtggcactgctgacaaaagagttagcccaaaagctgactgccggtaagccttgcccggtatgcggttcaaccgatcatgatccatctgcctcagtacatgaaacatatgaagccgacagccatcttgaagaggacattaaacggacagatgtattattgacggaagctgcagctctcagccaggagattctttcagccaaaattacgcttgaagaacagtccgcgcgctttattgaacagtgtccgtttttgcagacaattcaagcacagaaccttgaagcggcagcttccttcgaacatcagccggtgtatgaagcatttgaaactgccaaatttgaatggaaacgaatcaagcaggacattctttctgttaagacacgaatggcacaaatgattggcgcctatcaggagtctttaaaaaaggccgagcagcttaatgaaaaaatcggttttgaaaaaagagaagctgaccgtattgaaagcatcatcagcgagcttcaatcctcaatggacagcagtctgaatatgtttaaagaagcatttcagaatcaatctgtggacgaagcagaaaaatggcagcaagccattgaagaaaaggaccgggctgcagaagaatgtgaaaaacgaattgagaagagtatcgcgtttcttgctgagcatgaagcacaaaaggaaaaactgcgggaatctggacaccggcttgaacgggaaaagctggagcttcattatgcggctgaacgcatcaagagcgtgatagctgattatgagcacgaactcggagattatgcaaaaggagattcgattcaaatcaaactccgctctgtccagcaggatctaaagctgttaaaggaaaaagaacaatctttatatgaagaactgcaaagcgcccaaatgaagctcaaccaagcgaaaagccgcgcttcggcaagcgagctcactcttcaagaggcgaagggcagattggaaaaagcaaaagctgcttggcttgagcatacaaaaaacacctccattacccggactgaggaggttgaacaaagtctcatcccagctgatgaacttgaaaagatgaaaaccggcatagaccagtttatggataaactgaagcaaaatgctgcaaacttaaaacgagtagcagagatacttgccggcagagcattatcagagagcgaatggaacgaaaccgttgcagcattacaaaaagctgaggacgcatttggcgctgctatagaggaaaaaggcgcggcagcaaaagcactggctgtcattcgcgaccatcataaacggtttaatgaaattgaagctgaactgaaaaaatggcagacgcatatcgacaggctggacaagctgcaagctgtgtttaaaggcaataccttcgttgaatttttagctgaggagcagcttgaaagcgttgcgagggacgcctcagcaagactcagtatgctgacaagacagcgctatgccatcgaagtagattcagaaggcggcttcgtgatgcgggatgacgcgaatggaggcgtaagacgcccggtttccagtttgtctggaggagagaccttcctcacctcgctttcacttgctcttgcgctgtctgctcagattcagcttcgcggggaatacccgctgcagttctttttcttagatgaaggcttcggcacactggatcaagatctgcttgatacggttgtaacggccttggaaaaacttcagtcagacaatctggctgtcggtgtcatcagccatgtgcaggaactgcgtgcacggcttccgaaaaagctgatcgtccatccggctgaaccgagcggccgcggtacgcgggtatcacttgagttgatgtaagggaggagcggatatggcaaagcagactgccggaatatgtgagctgtgcggccggagcgatgtccagctgacagagcatcatctcacaccgaaagaggaaggcggaacgtttttgccgacagcgatgctctgtattccttgtcataaacagattcatgccttatataccaatcaagagctcgccgtacgtttaaacggaatggctgaactcagaagcgatccagagcttgcccggtttgtcaaatggatcagaaaacagccgcctgagaagctgatcaaaacaaagaaatcaaatgaacgaaaaaagaaaaaatgactaaaaagcagccctctctttgcagagcggctgcttttatccgtttccaaccatatcctgatcgttgacatcggggtctatataatttgtcgcgttgactgcattatttaatagaaggaaatctcccgtgtttcctgctcccgaaccgagcgcagattttgaagagcttttcggagaaaggtaaaaggaatcaccaaagtttacgactccgcccgatatggaattgatagctataggcccgacaattgctggcataaacgacaccctttatcgaagtctctgtttattatatgttcttggcgggcgattgtgagcgcggagactgaatctgtctgatatgtttgagtctcgcatcaccgcgaataagcgaagctgatccggcatgtaaaacagaagaggctgagaccccttgaattttgatgctgcgaacataaatagccggcacctcgtggcaaaacgcgctttgtacacctgtttcggggagcggcttcacagcctgctgctgaaagatctgatactcctttttgttaaatgagccttcattatggtaaaacgtggacagagaacgctgcacagcaaatacttttacactcatatcgatttcatttgtgtcgccaacttgaaacacacttgcgatcccgagggaattaaacttaactagtctgatgcgcgatatgcgtttaagcattattctggcgcaagcggagcaaacggcccaataataagagattcaggcggtgtatcaaaaatagaagacaggtaaatggattcagtgtctccgatgtggaaaacggaggaactggacacaccgttcatccggatgtccccgacttctaagctgcggttgatgactgtaaagatcatgcttgctcatctcctttcatttctgatggaatatgctccagaaagtgttctacagcgcggatgacatcacgcttcacatgctcagcgatatgttctgcatattgtgcaggcggtgtatgttcttcttttttgatatgggacatataataatggattcggctgtccatttgttttctgatgtcttcaataacatgatgtctgtttgtatcgtcaagtctgctgtcatattggttttcaagctgttccaaaatatctgggatttcctcggttaagtacatgtcgacattctggcggatctgctgcatgagctgagcgctctcttcctgctgcatcatcccgatttgcggtgtcgactggctgacgtcaaagttttggacgctgttcgggtcagtcggatttaaaccgatgttcaaagtcccgtcgagcctttcgattttcagctgatcaaatttatactccacacgctcaatggtagtggccggccgctgtttcatcgtattcatttcagtttgaatctctttcagctgacgttcgagctgctgaatgtgaatcgcctgctgctgaacgaaggaattcaagttttgcaggtaagaggaaacagattgatcatacatgttcttcacctctttcatatgattaacggccaggaggctggagcgggaccaatgaacctgtgtcgggctcctgcagctggagcggttgccctgagccagaaacttctggtgccggttctacatagcttcctgtattatacaaatttgacagtgacttgattgatccggcgctcccgatttgcagaatggaggagttgctgattgattccagccggagatagttgatttgaatggtttgattaatatagaagttcatgagcctcactccttttacgcattggccacgatcggctgatcaaccgcatcattgtcatacacattcgtcgcgttttgataattcatcaccttgaggctgtcgccggtattaaagctgccagcaccggcaaacgttctgacctgagcctgaggagaaatcgtaatgcagtccccgatgtgaacgactccgctcgtaccaatcgcattaattttaaacgctccgacaatggccggcatacgagcacatcctttgttgaaaaattaaaaaaagacaggtaaagtgaaatgacaattctgatttcaattgggctattcacgatagcttatgacaaacgcacatatgtgtgagagaaatttaaaggggacatatcggctctttatgaaagcgctttattttttcgggccgttatgtttaaacatggcaaaagaggatgttgggtataaattgagcggaaatgcggcgaaggatgccgctatccgcctatggtgatttttgtttatttctttggtgtttttgcgtgtagaatgctttttggagtatgtcgtgctgcggtattcgatttttgggcgggcacattctcgccctgaggtatatcccagaagtgctgagcaaaaagcggagttacatgtggtgtattctaattgttatagaaaatgatttacatacgggagttttcaagatatctcccaaaaatcatttcttctttaatccgggtattcagcaggatatccagctcttggctgcattgaatcgtttcttttgaattcatgccatatttttgtgcggtttcaattagtgtgatcctcatttcttcaattttactgttcattacgctatctccaattctagattttattttgatataaatacaggatatcgttagtataacctattttggctcaaaaggttgcctttcgtcaatttgactaaaaaagcgacaatttttgctgcggccttttttaatggagaaaggactaaagtcttgctaagtgtgcttgcaaaaagtcctgccgttcctcaatttctctaagtatgttggtctgctccttttcgatttgaaaggggctttttttgataaaaggatcatcagcagcactttgacaaatgtcaaggtgccattcgttgatgagaggagataatcgttcaatagtaaacgaccgcttcagcacgtttttcattaaggtgtgatattgcgacctgaaggcgggaatggatagaagccttgacgaaagcgtctttccttttgtcagaagcgggtcttcttcataccattcttgtacggcaagcgatcttgtctccatcggggaaacgtaaagccgaccggattcgtttaaacaaaatgtgtagtaaaagccttgattggtgcaggcgttgccgatcagccacaaaaaaaacagcttgacatccagatacaatttaatcctttcagccaattcgtcatctccggctgtgcggatcagtatgaaaaattcatgtaagaatgccgagaaatcattgttaaaaagggacaatggaacccttggatcggccgtcttcactccgtaactccttttaccggctggctgatggttcttgatgttcaaataaatgccttcaggctggccattgatggtcagaaagctgtacgaggcaacgggagcaggtacgccgatctggtcaaaaaaacaataggcgagtctgcgccgcatcagggacggatcatcctgttctgcattcaaaaaaagtgtcctttcaccaagcagagacttttcccagctgatttcataggatgccttttccgctctgtcacgctgtgtgagaagaatgggagaaacagatcgatctgttacgaaaagccccttggctgtacctttccttttcagctgctcccgatgaaaaaataaatgcacgcgctccatattctttcctccttctcaaaacgacatttgtatgatatgtagagcaagcccgtcctgaaacgaaatgaaaacggaaaggagaaaaagggatttcagcattcgacagagaatacatgaaggagcattctgatttaaaagatgatggaggaataacatgaaatttgcgacaggggaactttacaaccgaatgtttgtcggcctgatcattgacgatgagaaaattatggatttgcaaaaggctgaaaaaaaactgtttgaacttgagacgattccgggatcgctgattgaatgtatcgcagaaggggataaattcgttgcgcatgcaaggcagctggccgagtgggcaaagaaaccgaatgatgagctgggatcatttatgtattcattatctgaggtgaagctccatgcacccattccgaagccatcaaaaaatatcatctgcatcggcaaaaactaccgggatcacgcgattgaaatggggagcgaggctgatattccggagcatccgatggtatttacaaaatcgccggtaacggttacggggcatggtgatatcgtaaagagccatgaagaggttacctcccagcttgattatgagggagaacttgctgtcgtgatcggaaaaagcgggacccgcatttcaaaagaagatgcatatgaccatgttttcggatatacgattgtgaatgatatcacggcgcgtgatctgcaaaaaaggcataagcagttttttatcggaaaaagcttggatacgacatgtccgatggggcccgtgcttgtacataaatcatctattcaggagccagagcgcctcaaggttgaaacaagagtcaacggcgagctgcgtcaatccggttcggcaagcgatatgatcttttccattccggaattaattgaaaccctctcaaaggggatgacgcttgaagcgggcgacattattgccaccggtacgccatctggtgtcggcaaggggtttactcctccaaaattcttgcggtcaggtgacaaaattgatattacaattgatccgatcggaacgctgtcaaaccaaattggctgaataaaactggagggcggacccggacccgcccgttttttctgataatcatctttgtggcagaggacaagttcatggtactataagtggggtaatttatctgatagggggaacatatatgacacacctacatattacgacatgggtggtagcgctgattctgcttttcgtcagctactcgctgtattcgtcaggaagtgcaaagggcgcaaaaatcactcatatgattctgcggttattctatatccttattattttgacaggagctgagctgtttgtccgtttcgccaactggaacggagaatacgccggcaaaatgattctgggcattatcaccatcggcctgatggaaatgctgctcatccgcaagaaaaaagaaaaatcaacaggaggcctgtgggtcggcttcgtcattgtccttttgctgacagtgctgctcggtctgcatttgccaattggttttcaattgttttaatagaaaaacctatgaacccggctctttgatagagttgggtttttttatatttatcccctcatattccaaatcatttaaaataaccttaaaattccctgtaagcggtatctcgtcctatgaaattatgataccttcaaggagattcattattttgcaggagggataacatgaaacgcagaaaattcagctcggttgtggcggcagtgcttatttttgcactgattttcagccttttttctccgggaaccaaagctgcagcggccggcgcgatcgatcaggcggctgctctggaaaacggcaaagagcagacaggcgccatgaaggagccggaacaggtgaaatggtacaaagtgaccccgggagcaacggatattcagaaaaactcacatatggcactgaccgtaaagagtgattcagtactgaatgtatctgtatatccaagtaaggaaaaagcgcttaaagatgagacgtttgagatgtaccgttctttcacagcggaggatggaaaaagcgaagtcatttttccatacgcgtggagcggcccttactatgtaaaagttgaatacctcggagaagaagagccagaggacggcggaacggcagaagcagctgcagaagccaagtatacgattgggtataaaggcaccaaaaaacagccgtcagatttagaagaggaagaagcttgtccggttgaaatgagtgtcgatcagaagaaatcaggaaaaggcatcctggataagctgagagcgattcgtgatgagcagctgagccaaacagcagaaggcaaagaactgacaagcctttattacaaagcagcaccgtttatcgttgcaaagctcgcactcaataaaacagcaagaaatgaaatctatcaggatcttgtgacattaaagccgttatttgacgatgtgtcagaaaacggagcatcatcttcgcataaggtcactgaaaaggatcaaaaagcaatcaaccggctatatgataaagctttacaatcagtcccgtcattccttaaagaggagataaagaaacaagcggaccgactaaatatgaagcagctgcaaggcaaaacagccggagccattttaacagaaaaccatattgcagcaaaaagtgaagttcagacaacaaaggttattttcaaggtgaaggacaataaaagcctctcatccgtacataatgaaatgaagggcttttctgcaagcgcgcaatcgaaaaaagacatatccaatgtgaaaaaggcaaagaaactgtttgacaatctgtattcatttgaacttccgaaagatgagaaacagaacggcgcatatacggcaagcgccaaaagggtcaaaagcgctgctgcgacactatccaagatgtccaatgtagagtttgcggaacccgtgcaggaatacaaaagcctggcaaacgacattcagtacccttatcaatggccgcttaaaaacaacggtgaaaacgggggtgtcaaaaatgcggatgtgaaatatgagcctgccaacacattgctgtccaaacgcaagcttaacgatacactcattgcagtagtagacacaggcgtagacagcacgcttgctgatttaaaaggaaaagtaagaacagatctcggacacaattttgtcggacggaataacaatgcaatggatgatcaggggcatgggacgcatgtcgcaggcattattgcggcccaaagcgataacggctattcaatgactggattgaatgccaaagcaaaaatcatcccggtaaaagtgcttgattccgcaggttccggagatactgaacaaattgctctcggcatcaaatatgctgctgacaaaggagcaaaggtgattaatttaagtttaggcggaggctacagccgcgtgcttgaatttgctttgaagtacgcagctgacaaaaatgtcttgattgccgcagccagcgggaatgatggagaaaatgccttatcttatccagcatcttctaaatatgtgatgtcagtcggcgcaacgaaccgcatggatatgaccgctgatttctctaactatggaaaaggtctggacatctctgctccagggtctgatatcccgagcttagtaccgaacggaaatgtcacgtacatgagcggaacgtctatggcgacgccgtatgctgccgctgctgcaggattgctgtttgctcaaaatcctaagctgaaaagaacagaagttgaggatatgttgaaaaagacggcagatgacatttcctttgaaagtgtcgatggcggagaagaagagttgtatgacgattatggcgatccgattgaaattccgaagacacctggtgtagactggcattcaggctacgggcggctgaatgtcatgaaggctgtcagcgcagctgatttacagcttaaggtcaacaagctggaaagcactcaaacagctgtcagaggaaacgcgaaggaaggcacacttatcgaggtgatgaacggcaaaaagaaactcggcagcgccaaagccggaaaagacaatgcgttcaaggtcaatatcgcgactcaaaaacaggatcaagtactgtatgtgaaagcaacaaaaggcgatgcgaaaacatcgtataaagttgtcgtcgtcaaaggaaaaccttccggcacaccgaaagtaaacgcggtgaaaacgaaggatacggcagtaaaagggaaggcaaacagcaaagcgatgatcagagtgaaaaacaaatcaaagaaagtcattgcttctgccaaagctgacgcaaaaggaacgttttcggtgaaaatcaaaaaacaaaaagccggaacggtgctgtacgtcacggctgcggatacagataaaaaagaaagcaaggaagcaaaagtggttgttgaaaagtaaccaaaaagcggtgctcgatgcaccgcttttttatttgcgcccccgttggactgctgaatacataatggatcgctttccgtttgaagccgtccattcaaaacggtctcctgtcccttcgctgctgtagtgatgctgcatcgcgcattgtgcggtgtcatttgaaaagtgataaaaggacacaccctgccccgccgaagtatccgaaaagactcctttattataagaaaagacgcaatcgaataccgataagccgaagctgtgcaagtgctgcagaaatgcgagaaaggtttcgtcgtcaagcgaatccaaaagcgccatgagaggccgcttgactgatttctcatagcggatgcgttctccgccggaaagggagatgttttctgcaccgcatgccaaaaccaacttgtcctgaaagccggcttgctcccactttcctttatgatggacccagattgggctgtgttggagactgtccgccagcagtatatcgccttcaccgttttcgattaagcagatgccgtcttcaatgaggatggtgccgtattcccactttcgttcctctgtatataacaattgtttccgtttcatccatgctgtctcctttttcttcattcctctcttttctttccaattcaagcctgtcccatacaactcttttatggacaaatcaactatctgcctatagatgcataaacttactaaggtgctgaaagaaacgaaattgttacgaaagaaacgggattggagctgatgtcacatgtgtggaattacgggttgggtcgattttaaaaagcagctcgtccaggaaaaacaaacgatggacagaatgacagacactctttccaaacgagggcctgatgattcaaacgtttggggggagcaccatgttttattcggacataaaagacttgcggttgttgatattgaaggcggacgccagccgatggcgtgtacctataaaggggatacgtacaccattatttacaatggcgagctttataacacggaagatttgcgcaaagaattgcgggcgcggggccatcaattcgagcgtacgtcagataccgaggtgcttctgcacagctacatcgagtggcaggaagactgtgtcgaccatctcaatggcatattcgctttcgctgtgtgggatgaaaagcgtaatctgctgtttgccgcgagagaccgtctcggcgtaaagccgtttttttacacgaaggaaggctcttcatttctcttcggttcggaaatcaaagcaatcctcgcgcaccctgatataaaagcgagagtggacagaacgggactttctgaaattttcggtcttggaccgtccagaaccccgggcactggcatatttaaaggcataaaagaaatccgcccggctcacgcgctgacattttccaaagacggacttaatatttggcgttattggaatgttgaaagcgaaaaacatacggacagttttgatgacacggttgccaatgtcagatcgttatttcaggacgcggtgacgcggcagcttgtgtcggatgtgccggtttgcacattcctatcaggcggtctggactcaagcgcaattacagcgattgcggcgggccattttgaaaaggaaggaaaagcaccgcttcatacttattcgattgattacgaagagaacgataaattttttcaagcaagcgcttttcagccgaatgatgacggaccatggattgaaaaaatgacagaggctttcggcacaacgcaccacaaatgcgtcatcagccaaaaagatctcgttgatcatttggaggaagctgtactggtcaaagacttgccgggaatggcggatgtcgactcatccctgctgtggttttgccgggaaatcaaaaaggactttgtcgtcagcctatcgggagagtgcgcggatgagattttcggcgggtacccgtggttccatacggcagatgttgagtctggctttccatggatgagatcaacggaggagcggatcaagctgctttctgactcatggcagaaaaaattgaatctgaaagaatacgtaaatgccaaatatgaagaaaccttggcagaaacgccattattagacggagaaacgggtgtggataaagcaagaagacagctgttctatttaaatatgctttggtttatgacgaaccttttggatcggaaggatcgcatgagcatgggggcgagcctggaagtgcgggtgccgttcgccgatcaccggcttgtggaatatgtttggaatattccgtgggaaatgaaaatgcatgataatcgggaaaaaggcattttacgcaaagcgcttgaaggtattttgcctgatgacattctgtatcgcaaaaaaagcccgtatccgaaaacacatcatccggaatatacaaaaggcgtcagcgaatggctgaaaacgatcagaagccaaaaggactccgtgctccataccttgctggacagaaaacaattagatcagcttttagaaacggaaggctcctctttcaaggtgccgtggttcgggcagctcatgaaggggcctcagctgatcgcccatcttgctcaaattcatacatggtttgaagcgtatcgcattgatattgacgagaggtaggttcaatgcaaatgtgattaaaagccagagatgtatagatttaaataagaaggatagatgagcagggaaatatatgctctatctatccttttttgtacaacagcactatcgaattgcccccgcattccttcaataagaatgaataggttttaatgttctgccgataaaactagctgataccgggcttaactttaattccctagcccatacagaaagttgaccaatatggtgaatttcgtgagcgatgatatggtgtaatatttcatctcgcgtatataaaacacttgtctcccaaggaacgcttacaagttcatcttttatttgatctgaatgtgtttgtaaaacatcaattatttcagttcggaatgtatttgagagagatttcactttattgagtgtttgataatcagcgaactgaacagcgatatcttcttttccttggatagcacgaatccaactatattccacatcaataatatgaaaaagggtatataaaatattctctactccgccaagacggtttttaagtaattcttcagtggttagttgatgacaccaagtaaaccattgatctctaacctgccagttatattcaaaaaattttatcactgaactcactccaatactatcatgtatcataacaattagcccttttttccgtgattcctctattattgaagtgatgattgagaaatgtttacattctacctgttgtatggcattaaaaataataatgcatatctcgtcgatgatgctgtgcgtcttgttacttttacaaagtaagaatcggcattttcttcatatacaattaggaaaaaacatactagacttgaagaagcagtgatacataggagtgagaaaatgaaagagataaaagaagcttaccagcaatgcggacagattgttggcgaatacgcgccagcctgtttcaaagcattatcatatctcccgctaaagcaaagacaagcctcttgggcagtattgtcgttttgccacacggcggccagtgcagacgaaaaggtattgcccgcatttgaagctaaagctgatcatgtttaccaaaggacaaataacggtaaacaacatctatggaaggcttttgatcatgcgtatcggacctttacattggaaagcgaaccttttcgggagtttattgccgcacaaaaagaagacgccaagccgtatgatgaccttgatgaactgctcatgtacgcatatcggacgggcggtgctgccggattgatgctgctgccgatactgacacgccgaaaacaagatcagctcaaacaagcagccgtctctctcggcttggccatacagctggttcgcttcttaagtgatcttggcacagatcagcaaaaaaaccgcattccccgtcaggtaatgcagcaattcggctatacagaggctgatctccaaaaaggcaccgtaaataaagcgttcacaatgacgtgggagtatatcgcttttgaagcagaagcctaccttgaagagtgtcaggatgccttgccgctatttccgcagtattctcaaaaaacggtgaaagccgctcttcatttgcaccgggctgttttagaaaaaatccgggcgaagcagcacgatgtatttcaatatcacttcgctctcacagagaccgaagtgaagcagattctgtctgatatctaaaaaacacccggccttgattgagccgggtgttacgccatacctttttgaatccagatacgtgagcgccatcttctgtacattaagattccccggacccattcatccgcgataaaagaaatccaaatgccggcaagaccgaaaccgaggtggatgccgaaaagataagcaagcgggaggccgatgccccacattgaaatcattgccatgtaaaccgggaatttcgcatcccccgcagcccgcagagagttaatgataatgacattaaacgagcggcctggttcaagaataatggtcatggcaatcaataggcttgcagttgctataatgtcagggctttgtgtgaagagtccgatcaggtcttttgaaaagatcgtcatcaaaacagaggtagccgcagcaattccgagtgcccaatataagctcttcatgcagcgctcataagcggcatcaaattgtttgccgccgatataacggccgattaagatttgtgtaccctggctgatcgcagtgccgaacagcaaaataaacatcgtaatattttgcgtatacacttttgttgtcaacgcctgcgcgcccatgatggcgataaaatacgtgacaatcatttgcgaaaggttgtatgaaagctgctctcccgcagaaggaatgccgattttcagcagcttgcgcaaatgctctttatgcatatgaaagacttttttcagcgacatcttcagctggatgcgtttgttgacaatcacaatcatcgcgattaatccgatgacgcgggcgatagatgtggacatggccacaccggtaacgccgagaacaggaaagccgaacaaaccgaaaatcacaacaaagtttccggcaatgtttaaaatgttcatgccgatagtgacaaacattgtatcttttgtgtagccgtagctttttaagatcgcgctgaatgtcatgattaaagcctgaataaaggacagacctccgacaacttgtaaaaagactttcgcatcaggcatcagtgcgtctgataatcccatcatatgaagcagagggacagccgcgaaaaagacgacggcgctgatggccaggctgatgaagaagttggcgccgattgacacataagcgacttccatggcttctttcttttgccgtgagcctagaaattgtgaaatgataacggtcgttcctgttgcgataaagctgaacatcacgataattaaatttaaaatctggttgctgacgccgactgctgccacgctgttatccgagtattggctgagcatcagtgtatcggcattacccataaacatatataatgagacctcaataaagatcggccaagtaagcgaaaataatgagaacgttttgtcagcgggttttttcaaagcagttgatttgaagacagcttgtttcatagtgtctaacccctttcgtaaataaaatcaacgttttaaagtgtacctccatttccttataataaaaagggatagaaacgatacttcttgtaaaaatccgacttaaaaaggaggatgattcaaatgccccgcatcctgtttacagtcccgccttttccggtatttattgcagctggggaaggggtttttaaaaaaggagaaacccatgtgaaacgtgtattctccgtgtttgatctgatatatgtcaaacagggaacgttatatataacggaaaatgaaacatcgttttctgttgaaggcggcgagtacatcttgctttctcccggtcttgaacactacgggacgaagggcagtgatgaagcaacctcctactattggcttcacttcgatgaacatcgatatgaatttacggcaaagggaggcagcaactggtctgagcttcagcaggaaaaagggagcttcgaagagccggcccgctacggattggctttgccgagaaaaggcaaggtgcagcgcccgcagtttatggcgcagcagtttgaaaagctgatcgattactccgcggaaaactctgatttgcccctcagaaagcaaatcttatttgaggagctgatgctgcatcttcaaaaagaagcgttccaaataccgtctgcgaaagagcgggtagcctgggaggcggcccggtacttacaggagcactataaggaaaagacgacaatcaaggatctgtcgctcgcccttcactatcatcaggattatgtgagccgctgcatgcagcaggtgctcggcgtaactccggcacaatacacgaaccgggtgagaatgacggaagcgaagcgtcttttatcctctacaaatgataaaatgggcgttattgcggaaacggtcggaatggaagatccgacatacttttcaaaactctttaagcagatagaaggcatttcaccaattgaataccggaaaattgtcagccggaaagttcaataaccagacgagggatgaacatgaaaacaacaatttacgatgtggcaaaggcggcgggtgtctcgatcacaactgtgtcccgtgtgataaacaatacggggagaatcagcgataaaacacggcagaaggtcatgaatgtcatgaatgaaatggcatacacgcccaatgttcacgccgcggcgttaacgggaaaacgaacgaatatgattgctctcgtggcgcctgatatttcaaatccgttttacggcgaactggccaaaagcattgaggaaagagcggatgagctcggttttcaaatgttgatttgcagcaccgattacgatccgaaaaaagaaacaaagtatttttctgtgctgaaacagaaaaaggtggatggcattatttttgcaacagggattgaaagccatgacagtatgtctgctttggaggaaatcgccagtgaacaaattccgattgccatgatttctcaggataagccgcttcttccgatggatattgttgtgatagatgacgttcgtggcggatatgaggctgccaagcatcttctgtcactcggccacacgaacatcgcctgcattattggagacgggtcaacgacaggcgaaaaaaatagaatcaaaggcttccgtcaggcgatggaggaagcgggcgtgcccattgatgaatcacttatcatccagacgcggttttccttggaaagcggcaaggaagaagcgggaaaattgctcgacagaaacgctccgactgctatttttgccttcaacgacgtattggcttgtgccgccatacaagctgcgagaataagaggcataaaagtgccggatgatctttctatcattggttttgataatacgatactcgcagaaatggcggctccgcccctgacaaccgtagcccagccgataaaagagatggggcggagcgtcatcgaactgctggcagaagcaatagagggaaaacgaaaggcgaaacaaaaaatagtgctcccgcctgagcttgtagtcagacattctacatcaccgctcaacacatgagcccgctaatgagcgggttttttcattatgacagttgaagccaaaaaaacatattgcgtgtaaaccaaaggcagtgtaaaatgaaaccatcttttgagaaagcgcttgcgcaaaatggcagagcggatagaaccgctgtttttttagctgttaagagaaagcgctttcccaaagcgagcccgaaatgagataaaggagaggatgggacgtggaacatcaagtaaggtgcgcagtattgggattaggaaggctcggttattatcatgcgaaaaatctcgtcaccagtgtgccgggggcaaagctggtttgtgtcggtgatccgttaaaagggagagcggagcaggttgccagagaactcggtatcgaaaaatggtcagaggacccgtatgaagtgttagaagataccggcattgacgctgtcattatcgtaacgccgacaagcacacatggtgatatgatcatcaaagctgccgagaacggcaaacagatctttgttgaaaaaccgctgacattaagccttgaggaatctagagcagtttctgaaaaagtgcaggagacaggtgtcatctgccaagtcggctttatgagacggttcgatccagcatacgcagatgccaaacggcggatcgacgctggagaaatcggcaaacctatctattataaaggctttacgcgcgaccaaggcgcgcctcccgcagaatttatcaaacacagcggtgggatttttatcgactgttccatccatgactatgatattgcccgttatttgctaggggcggaaattacttctgtttcaggacacggcaggattctgaacaatccgtttatggagcagtacggcgatgtggatcaggcgctgacgtatattgaatttgactccggcgcagcgggggacgtcgaggcaagcagaacctctccatatggacatgacattcgggcggaggtgatcgggacagagggcagtattttcatagggacattgagacatcaacatgtgaccatcctatcggctaaagggagcagttttgatatcattccagactttcaaactcgttttcatgaagcctactgcttggagcttcagcatttcgccgagtgtgtccggaatggaaaaacaccgattgtgacagatattgatgcgacgatcaatttagaagtgggtatcgccgcaaccaattcctttcgaatcggcaggccggtacagctagatgtgaagcacgcttatacaggtatgtaaaagctaaatatgttgcattttaggctttccgcaaaaaaaagcaaggacatttttagcccttgctttctcttttctcatataaatagtacatataatcagtaggtatgcctgaatggcccagctgtctcagcatggcggttacgttacctctatggtaagtcccgtgattgacgacatgcaggatggtgtctgcataggttgattccagtgtacctagtttcggatgctgcattgtgaaggtctgttctaagtccgtctggcggctgaagaaatcatgatactgtgactccagctcggcagcgtgctgtttaatcgctgccatattaccttgcgcggactctaatttgcctgcgctgtctataatctcttggtaggccactcccgaaagaacattcagccaaatgtagtcagccctgcacatatgaagcagcacgtcgctgacagaaggaaatacgctctttacttcttgataggcagtttcctccggcaggttttcgatatgggtaaatattttcttgtttgcccaagaatgatagtcataaaactgttttgcatcagtcatcagcatgcccccttttctaagaaattcgtttttttcatctgtttctccttcaattgcaaaagagtgacaccccaaaatatcctgccgctgcccacataaccgctgcagagcatttgtttacgatcagcataagcctgccgctcgtatctatcgtctgaaacaaccggcccgctattgcaaggctgataaaccaaatccaagacacagcgatgcaggcggccataaagagccatttctcaagccccgaatattgaagagagctcgtgccgatgacgccgatcgtgtccagaatggcatgcgggtttaaaagagaaacagcggccgcaaacgcagcttgcttttttggtgtgaacgtatgtttctcattttggcttgtgttcggacggctgttccaagtcacccagcccatataaagcaaaaataaaaatccgccggccatcatgactgtctcaaacacaggcagctcctgcacaatgacagacacgcccgcaacggctaatacgattaacagggtatcgcagactgaagcactgatgacagctgggagagcccgccaaatatgcttttgccacgcgccttgctgaaaaataaacacattctgcactcccagcggcaaaattaagccaaacgcgagcacaattccgtgaatgattgcattcatgctgaaaaagctcccttcacatttttttcaatcataagagagattgtcactaaagtctccagccatttggttgggttagaaaccagccaaatgtataatgtgtaaaaaaggggggcatgaccttgtcgcaatggcagccaagccgaaagtcggatgttccgctgcatcggcagatcgaacaatatatgaaagacaagattcttcacggagagtgggctgtagggacgaaaatcccctcacagagaacgctggccggcatgtttcaagtcaaccgcagcacagtcacagcagccatagatgaactcacgtctcaaggcttgttagagggaagaagaggcggcggtacgaaggttgtaaacagtacttggagcgtgctggcggctgagcctccgcttgattggagcgattacgtccgttcgggcattcatcgcgccaattcttccatcattcaagctattaatcagaacgaaccaagagcggatatcatcagattaggaactggagaactttcaccggatcttgtgcctgctgacacaattggacggatgtttcagcaaatcaatccgggcgccctgtctttaggatatgagcagccgaaaggaaaccgtcagctgcgggaggcagtagccgaccatttaaaaggaaagaagatccatgtgtcaccgtctgcaattttaattgtgtccggtgcacttcaggcacttcagctcatctcaattggacttttaaaacgagattctgtcattttgacggagaagccgtcctaccttcaatccttgcatgtatttcaatcagctgggatgcggcttcgcggcttgccgatggatgatgaaggggtcaaagcggggcttgtttcttctaatcgaaaacaatatggaggacagctgctttacacgattccgtcgtttcataatccgacaggcacagtcatgtcagagcagcgaaggaaagagatcatcagcctgtcaaaaaaagagcagctgcccatcattgaggatgatgcgtacggtgatttatggtttgaagaaaaaccgccgcagccgttgaaagcaatggatcatgagggcaatattctgtatctgggcacgttttcaaaaacggttagccccggtctgcgaatcggctggcttgccggtccggagccggttattgaaaggctggcggacattaaaatgcagacagactacggatcaagcggcctgtcccagtgggcggctgccgagtggctgtcacaggggtattatgaagagcatctgacttgggtacgcaggaagcttaaagaaaggagagacgcagccgttcattttctcgagcggtatgccggggacattgccacgtggcggattcccgcaggcggcttttatatttgggtgacatttcacaaaaacctgcctgtcagccgtttcttttatggattgctgaaacggcaggtgcttgtgaatcccggctacatttatgacggtgaagaccgaaacagcatcaggctgtcatattcctatgcatctcttggagatttggaaactggcattaaagcggcagctgaaacagcacgctgcctgatgatgtcctaagctttggttatacgatgacagctcccagtgccctggcgaaggcaatcgcgtgctcaggtgcgattttgcagcctttcaatttgtcgagggagacatgaagctgttcaaaacggcacgtgctgatgtccatgttttgaagggatgtgccggtaaagctggcgccttccaattcgcatccgtcaaagtgtgtctgctggagcaccgtattgctgcattcactttgcataagagcacagtgatcaaatcgaacttgtttcatatttgagtacgaaaatgagctgaaatgtccgtggcattcctcgaatgaaacatttcgcagcgttgcttccgccacattcattccaaccatttttgactgcttaacagaagttctgtgaatgacagccccgctgaaatcggcgtttgataaatcacatttttcaaagatcacatcggtcagttcaatatgccgaaaagacacatcgataaagacgacatttctgaataccgttttttcaacacagagtctttcgatatcttcgccgcagattgtacaatcttcaaacaaatgcatgctgattacatcatcctgcgtcacggcatcatgaaaatctgcggtttgcaggttttccggtatgttcggtttttgaattgcgattttattcatgtgatgacatcctttgctgcccgaaaaacagaggcttccgggttcaatttaatagatcgttaaggaaattgatacatatagtaaatcgtgaagagccttttcttggtacagcagccagcttgttttgtaagcataaatggaaagcttcctatacgtcaaggcgtttacaggccgggaaagccaaagggaacaggaggaatgcggaatggggcattacatcaaaaccgaggagcatgtgacactgtttgtagaggatatcggacatggaaggccgatcatctttttgcacgggtggccgttgaatcataagatgtttgaatatcaaatgaatgagcttccgaaaaggggatttcgttttatcggcgttgatttacggggatatgggcaatctgaccgcccttgggaaggctacgattatgacacgatggccgatgatgtgaaagcagtcatttatacgctgcagcttgagaatgcgattcttgccggtttttcaatgggcggcgccattgcaatccgttatatggcaaggcatgaaggagccgatgttgataagctgattttactgtctgcggcggcccccgcgtttacaaaacgcccgggttatccgtacgggatgaggaagcaggatattgacgatatgattgaattgttcaaagctgatcggcccaaaacactggctgatttagggaaacagttttttgagaaaaaagtgtctccagagcttagacagtggtttctcaatctgatgctggaggcctcctcctacgggacgatccactcgggcatcgcattaagagacgaagatctcagaaaggaacttgctgcaatcaaggtgccgacgctgatcctgcacgggagaaaggatagaattgcgccgtttgattttgcgaaagaattgaagcgcggcatcaaacagtcggaattggttccgtttgcaaacagcgggcacggagcattttatgaggaaaaagagaagatcaacagtttgattgcgcagttctccaactcataagaaaaaacccgacattgatcgggttttttatataattcctctgttttgcagtgcgttaatgatgagatcagctccatcggaaatagaggtctggtctgactcaatgatgaaatcgggtgaaagcggcgcttcatacggagaatcgatcccggtgaaatgtttgatctctccgtttcgcgcttttttataaagcccttttggatcgcgctgttcacaaacatgcagcgggcacttcacataaatttcgaagaactcacctttaggaaagagcgctctaaccatgtcccgatcctctctgaatggagaaataaaagccgttaaaatcatttgcccgctgtcgacaaacagcttcgccacttctccgatccggcggatgttttcaatcctgtcaccagtctgaaatccaagatctttgtttaagccgtggcggatattatcaccgtcaagcacgtagctctgaatgcccttgcggtaaagcttttcatcgacagcattggccagcaccgattttccggagccggacaaacctgtaaaccaaaggacgcagcttttgtgtccgtttaaggactgtctgtcagactttgagatggcagcgggatgccaaatgatgttcggattgtgtgtcattgcaattccccgctgttttgcttgatggcaacaggctgttggtgaagtcccttgatcagcacggctgcgacctcaggccggctgaattctttaggcggctttttgccttggcggagaagctctctcacttttgtgcctgataagtggatgtggtctctcgggctgtgcggacatgttttggaggtgcccatgtttccgcattttcggcaataaaagctgtgctcaaaaaacagcggcttgatgcccagctcttcctctgtgaatgattgaaaaatattttgggcgtcgtatgttccatagtagctgccgacacccgcgtgatcacggcctacaataaaatgggtgcagccgtaattttttcggacgagcgcatggaaaatcgcttcccgcggacctgcataacgcatggcggcagggaaaaccgataacatgacacgatcctttggataatagtgattaagcaaagcctggtagctctccattctgatatcgctggggatatcgtctgactttgtttctccgacaagcgggtgaagcagcagaccgtcgaccgtttctaacgctgttttttgaatgtattcatgcgctctgtgaacagggttcctggtttgaaagccgacaatcgtcttccagccgagttttttaaaggcggctcttgtttcagcgggcgttgcataaaactgttcgaaagatttgtcaggcaggcggctgaccgtgataggccctccgatatagtaatccgggcgcgccagcaatttttttacgcctgggtgggcaggatcgtttgttttaaaaacagacagtgcttcttgtgttttatcaggctggtatatatcggtgactgtgatcatgccgtaggtaacaccgtctttcacaagcttgacgtgatctccggcagacagctgttttgctgttttttctccgacaggcagcgtaatcggcaggctccacggcaagccgtttgccagcctcatttctttcacaacacgatgataatctttttccccaaaaaaacctgttaacgggctgtatccgccgatcgcgataagctccagatcactcagtgcaagctgatccagctctgcttggcacgcgcacccttcaaaatggcatgcgggatcacagcggttgattaatacccctccatggggttcgtttccattcaacgtgttcaacctccatttatacgtttccttgttttcttttctgcagttaatgaaagtttgacatcagcgtctcaacatcatttcgattctcacatcaagaacctgccatccgctattcctgatgcaggccgcattctgttttctcccgtccggcccatcttccagccctctcatcgttcgggtccggggaaggcagtgtacacatttcacagcctatgctcggataatgttgatcgtgcagtttgttataaggcaaattgtgcaggcggatgtacgtccaaacgtcatcccatgtccagtggataagcgggcaaattttgatgagctcaaacttctggtccaggtttacgtattgaatatgctttctcgttggtgactgatcccggcgcagtcctgaaatccaagctgtcatgccggacaggtgctttttgagcggttcgattttccgcaattggcagcagaggttcgggttatgcttccacagctctccgccgtacttcgtcccctgttctgttaagctcagctcgggttcgagcatctggattgcaaatcccggatatcgctctttgacggtctcgatcagctcatatgtttcctgaaaatgaagcccggtatccaaaaagatgatgtgtgcatttttgttgatttttgatattaagtcgagaagcaccattccttctgcgccaaagctgcaggcatacacaatcttttctccgtacgttcggtaagcccatttcaacacatcgagctcatcgatcaattgatccgttatccgtttggacagcatgtcgttccatgtgtcatatgtgatggtttcgttcaatgttttccccccgtttgcatctgctttttttatctattgatcgagttataggcagactattcattttttgcataaaggttcaggttttaggtgccgcgcccgcctaaaatgaggtgcggaaccattaagagcccggctgaatatgctttttagcaaaatggttttatgcccaaggagaggtagtatgccgattgccatttatcaggggcatcatcattcgcttgccccggcggacattaacatcgtcattgatgtcatcagagcctttacggtcgcccattatgcgtttatcggcggggcgaaagagattttgttggtccggacagctgatgaagcctttgcgctgaaagacacctatccggattatgttttgacgggagaggaaaagggggtcggtatcagcggatttgatttagataattctccaaaacgtatggctgggcagaatatgacggataaaagcctgatccagaaaacaacaaacggcgtcacagcagcattgggggcgctgaacgcaaagcatctgttcgtaactggattttccaatgccaaaacaacggcacagcatgtgaaaaagctcgtcgcaaacgattgtgtcataaacatagtggcttcccatccatccggtgatgacgatatggcatgtgcggagtatatcaaaggcatcattgaagggacaaatgtggtaacggctgcggaggcgattgaaagaataaaaggctcttctgttgcggagaagttttttgactgccgccagccattgtttgattcggaagacatcgtttactgtacaaaagaactgacgggcgatttcgtgatgaaagtgaaacaagatggagaagttccaacgatagagagggtcataatatgaatgatttttcactagaattgccagtgagaacaaacaagccgagagaaaccgggcagtccattttaattgataacggctatcccttgcaatttttcaaagatgcgatagccggagcgtccgactatattgattttgtgaaattcggctggggcacctcattacttacgaaagatcttgaagaaaaaatcagcacactgaaagaacatgacattacatttttctttggcggcacactgtttgaaaagtacgtaagccagaaaaaagtgaatgaatttcatcggtactgcacctatttcggctgtgaatatattgagatttcaaacggtacgctcccgatgacaaataaagagaaagcggcttacattgccgatttttctgatgaatttcttgtgctcagtgaggtgggcagcaaggatgcggaattagcaagccggcaaagctctgaggaatggcttgaatatatcgttgaggatatggaagcgggcgcggaaaaagtgattacagaagccagagaaagcggaacgggagggatctgttccagcagcggcgatgtcaggtttcaaattgttgacgacatcatttcctcggatattgatatcaacaggctgatttttgaagcgcctaacaaaacgcttcagcaagggtttattcaaaaaatcgggccgaatgtgaatctggccaatattccatttcatgatgccatcgcgttggaaacgctgcgtttagggctaagatccgataccttttttctgtaaaatagcggctgcggggctctcgtcgtgaagagagcctctgcctattattttttatggcggtacataggcgtgagatagggaagtgaggtcaggcggatgttgtagatgaagtcgatgactcttgtcgatatcacctggcatatgagggcttgaatgacgatgccccagtcaataatagacgcggtgaccataaaaatgatgcaattcatgatgagcaggatcgttccaggattcccgccgcggtagatagaaatcatcagagcaagggctccgaatcctccgttcgaaattttatatttgtataaaagtccgattccgagtcccaataacactgcgccgcttgccagatcaagccacaggttagatgtgatatcaggaaaaactgcatcaaagatcaataccgagacagaggtgacggtgatagaagcgagggtgccggtgaatgttctcatctccagccattttaaagcggtaaaaagcattgatacattcacagcccacactgaaaatccgtgggggatttgaaacagataatgcaatagcaccgcaatacctgctgcaccgcctgtcggaatatcatgcggaaataaaaacaaggacatgccgagtccctgtagtacgccgcctacgacaatcataaacgtaagttttgctttcatcagcagttcagccattaagtcatttgctcctttatgaaaagacttgtccgctgttttcattttatgaggctgtccattatttatgtctcaaaataaagaaatggcccagcttaataggctgagccatcccacttgtagcgattgacgatctccatattgatctctgtgccaatgccttttcctttcgggatgtggaccattccttttgaaggctgcaggctgacgagatctgtaaaaggattctccatgacgtcccactcgatcggttcaatgtgatcgtacttcattttagaccatgggggcagacaggcttgtgcaaataaagcatagagccgtgaaagcgatccgtcatatgcatgggcggatgctctgacgccgaaataacgcgtgagctggaggcagtcccgaaactcatcaattccgttgacatgcatgacatcgggctgaatgatatccaaacagcgctgtgaaaggagaggcacatattgcgccgggcctttcatgttttctccgccggcaacaggaacagacaaacggcttcgaagcatagcgtaatcctgcggctgatcaaagggcaaaggctcctcaagccagccaatgttcgtccattcggagaaatagcgctcccatttaaaagccgcagcggtatcgtagctttggtttgcgtccagaatcatcgtaatggagctgcctgctgtatgctgcagcgcattgatgtgccggacatcctctttgaatgaagtcccgccaattttgactttgatttgctcaaaaccttttttcaactgggcttcaacattggagactgagcggctgatccattgcggggagtctgagtacgattgaaaagacgcgtacacaggaatctcctctctgtatcgcccgccccataattcgcaaaccgaacaatccgcagctttggctgcaatctctgtcagcgccatgcttacagcggaggccgcccgctggtgccatttttgaatcgtgcgcactaatgacaggcggctgccagcctgttttcctaaaagaaacgggatgatccgtttcgtaaaaccgacatggagagcagggagccaatcaacacattctccccagccgtctatcccgctttcggtgataatcctgatcagataacaagtccgatatcgtttaagcccgttggcgtctccgtatggcttgtttaatcggtgcaagagcggaaaggtttcaatgcgtacaatcttcaaaccgtgtgctacctttcctcagcgggctgcagccgattgccagccattttagggtcttctttctcttttgtttcttcattattttgcttcacatggattaacatcatcacaagaatgccgacaacgagagtcaatcccgcaatgcttaaaaacatgccgggtctggaccattgcatcaggcggccgaaaatcggagggccgattgctacccctaagaagcgtacagatccgtacagcgaggtgacaaatccccgtctttccttgccgacagccccggtaatgaaactgttcacacaaggaaggacaagacctgagccgatactgctcagcacgagaacactgataaagaggacaagattttcaatgaatgacagtgccgcgtaagatacggtcatgaacgccaatccgagtacgatcagttttttcattaacgattgcttttgcccgattttgcttcctgttgtataagacgtaacacacataaccaaaagcggaatcgctaaaatcaagccttttttcacgccgtcggtgtcgtatgttttttcaagaacatctgataggtaaaacaggatgccgaataaagtaaacaaacaggtcgcaccggctaaataagcggtaaacagccatctgccttcatgtttaaaaacacttaacagccctttcgcatattttccgataggtggcggttctttttcctttttcttctctttaataaaaatccaagtcagcacgattgaaatgatacaaaacacagggaaggcaaaaaacgcgccataccagacaagcagggcgataagcgagccgatgatcggtgaaagcactttccccatgccgtttgaagcttcaacaaggcccagcaccttgctctcctgggcgcctttaaacagatctcccgtcagtgccatggcaatggggcctgttccggctgccccgattccctgaagcgctcgtcctgccatgacccaaggaaaggcattgtcaaaaaaacctgccgcaaacccggctaacaaaccgccggcaccatacaaaattaagcagggaataatgatgattttccttgagaatcggtctgcgagataaccgacaatcggaatcgcaaatgctgcaatcaaggaaaatactgtgatcacgagactgacttgaaattgtgataaatgaagttcagatttcatttttggcaaaatcggaataagcatcgagtttcctagggttaatattaaagggattgaaccgattgctacaatcgtcattccgttattttgttttgatgattccatctcagagcacactccttttcttctgcttagaatgtccctgatggcttcgtttattcagcgatcagacagcaaaaaaccgaacagaagatacctgttcgggaaaaaagagggttaaccgagagcctgtgaaatcaaagcatataagtgtccattttgaataggcgcttttttctgatagaacaaaatcggaggttcatcatctttatgaaatcccatttctatcaggctgtcatgcagagacgtgtgttcactcggtatatcgattcgcatcggcccttgtttgccggccgccagccttgtaattatctgtgctgcaacatctgatgatggagcgatgatagggccgaatttcaaattggccggtgtctgtacagaaagtccgtagccaatgagctgtccgtcctgatttctggcgatgatacattcgcatgaagcagaaataagctgctgcaaaaggtttgatcgatctccgccaaaggcagccagatccgccgcggttaagtcgtgaaagtcttgttctctaaaggatgtcagttcagcatcaagcttttttgtataaggttgaaaactgtgacagctgtactttcgcactgaacctgccgtatgaaaacctgctttttcataaagcggcaaaccttcttttgtggcgcaaagcctgatggcggtgttttcatccgtttgggtaatacaggcgtttaccatacgccggccaagaccgagccgttgatattctttgtcaacgatcacgaggccgatagaagcaagccggccaaacaaaaacaagccgatgcaggaaataatatcaccgctgacattttgatagccgaaaaagcgtccttgctggacaagcagtgccagctcttgttcgccgtaatccggccacccggcttgcctgcaaagccgcaatagactagggatatgttcttcatgaagcttaatcagctcatcgattaccctcatacagatcacctgcttgtttcgagttttttatacatgatgatatgtgtgcctatgccgggaatctcaaacggttcgccgagttcttcccagccaagctttgaatagtagcctttcacatggcttctggcattgcaccagactgcctgaacgccgttctttgccagtttctcttccgcgtgtttgatcagcgtgctcccgcctttttgatcacgatatccttcaagcgttgccatgcctctcagccgatatgctggggattctgttattaatggctgattttgcggggaaaaagaagcgatgctgatcagctttccttcaaaaaacgcgccgagatgaaaggagccttttgcatgatcctcttcatatttgcattgttcaatggattgatggggacgcagaatgcggtgccgaatttcatatgtatcttccgcggaaatggttttgacttcgagcataatgttcctcctcatgactgtttttctatatcgtaacacgaatcccgttgaaaaagaccgcccgattggatcagacagtcttttaagggattaatgcaaaaagatattttggcgctgctcatctttttgctgaatatatgaagtgagctcagcggttaagtcagatctgaggaaaggcgttatcaagtagatgccgttaaacagctcgcatgccgtatccagcagggagcgtgcaattgcaaggccttccgccttttgcttttctttatcttcaccggcatgggccattttttcgcgaatcgtatcagacagcttaatgccgggaatttcattatggatgaattcggcattccggctgcttgtcagcggcatgatgccgatatagatcggcgtcttcagatgttttgtttcgttatggatatcgacaagctgctgctcggaatagacaggctgagaaacaaaataatctgcaccgcaatctatttttttctcaagccgttttaccgctttatccagatggcggacgttaggattaaatgcggcggcaactgagaaattcgttttcttgccgagcggttttccagacagagacagaccttcattgaattgtttgatcagcctgattaaatcaaaagatgttaaatcatatacagacgtcgcaccaggaaaatccccgattttagaagggtcacctgtaatagcaagcacgtcattcagccctaacgtatcaaggcccattaaatgtgactgtaagccgataatgttacggtcacggcacgtaatatggacaagggaacgcatatcgagctgctgcttgacaagggcaccgcaggcaacattgctgatccgcggggtcgccaaagaattgtcggcgagtgtcagggcatcgattcccgcttcttttaattcagcagcagcggacagaaatttgtcaaagctcagttttttcggcgggtccagttctacgataatagagcgttttttcgctgcgatctcatccaggccgggctcggttcgctcgtgatgaacagaaatgaattctttggcccgggttttgacttctttttccgtaatcggagccagtccgccaactgcttccgccatcgccctgatgtgattcggcgttgtgccgcagcagccgccgataatccgcgcaccttgcttacggaattctgacgcgctgttttgaaaatacgtgccgtctgtttcatagacgagccgtccctcttcaagcgaaggaagactgctgttcggataaacggataagaatacgtcatcaaaaattggcacttcgctaagcgcttcaatcatgtgataaggcccgagccggcagttaatgccgacgatatcagccccgagatccgcaatcgatcgcaatgcttcagaaagaggtgttccgtcctgcaatacgccttgctcgtgcatggagacattgagcattatcggaagatcagtctctttgcgcgcgattttcagcacttcacgggcttcttccaaatcataatatgtttctaacagcaagccatccggctcttcatgcagcagcagatacagctgctcgcggaagctgcgcttaatttcgtcaagactgtacgcgtttttattaaatgtgcgtatgccgcccatcgttccaagcacgtatgcatcgcctgctgaagcccgcgcgatctttacggcctcctgattcatttttttgatgtcatcctcaagcccgtgtctggataatttaatatagttggccccgtacgtattcgtttgaataatgttggctcccgcttcaacgtacgctttatgtatgcgctgaatttcctccggctttgaaatattgagctcctcaaaacacctgtcaatgccataggagtagaggagcgtccccatggcgccgtcaccgattaacacctgtctttgcaaatcttctaaaagtcccattgtctgcctcctttattcacatcagcaaggaaaaaagagaaataaaaaaagtcctcttaagaagaagactttgtcagtgattttgtctcttcttatcttccaagctgttcgagcttgctggatttagcaccttggtcatggctgatcgccattacaccggttgctgaagcttcgtcgggccagtccctctgcttctcttgataagaacggatatgaaattttcgtgtcaggaagtgccaaaagatatctggcgtttttccctttctccaaatttaccgaaaataaagacaataatcaataggaatcagaaaatttatctgaaatttataaattgaacgtcaattggcagatctgctccccgtacagctgagataatctgctgcaggtcatctttgttttttccggtgacacgcacttgatcatcctgcacctgagactttactttcagtccggagtttttgatgatcgtattgattttttttgcgttgtccttgtcaatgccttgaacaagctttgcacgctggcgcaccgttccgcctgacgcgttttcaaccttgccgtaatcaatgttttttgtcggtacgtttcgtttaatcaatttgctgaccagcacatctttcagctggcttaatttgaattcgtcatcggaaacgaggaccagctcctctttatctaaagaaatgtcgcttttgctgcctttaaagtcatatcgggtactgatttccttcagtgcgatttggattgcgttttgcacttcaggcaattccaccttggatacaatatcaaatgaactttcttttgccatatgaaaacctccataacatttaacttatgtgttgattatagtagaataaagagaaacttccaacagaacaaagaatcaatttgtgatgattggaaaaaatgttaacaaaatccgcagagaataagcggaacaggaaggacgatagcatgagaccagggcagcaattaaccttgagtatagatcaccaaaccgacttcggttactttttaaccgatggggaagatacgattctcttacataacagtgaaatgactgaggatatcgaggacagagacgaagtagaagtctttatatacgtagaccagcaggaaaggcttgcggccacgatgaaaattccgatcatcagcgcggatgaatatggctgggttgaagtggtggataaagtggaagatatgggcgttttcgttgatgtcggtttatcgaaggacgcactagtcgcaactgagcatttgccgccgtacgaagatgtctggccgcaaaaaggggacaaactttactgtatgctgaaggtgacgaaccgggggcgcatgtttgcgaaaccagcgccggaagatatcatcagcgaactgtttaccgacgcttcagaagatctgatgaataaagagctgacaggtacggtgtacaggctgatcgcatcgggttcattcgtgatcacggatgacggtatccgctgttttattcacccgtcagaaagaaaagaggagccaagactgggttcaagagtcacaggccgggtgattcaagtgaaagaagacggttcagtcaacttgtcgctgcttccgagaaaacaggatgcaatgtcagttgatgctgagtgcattctaacgtatatgagaatgagaaacggtgccatgccgtacagtgacaaaagccagcctgacgatatcagagaacgttttaatatgagcaaagccgcctttaaacgcgcgctgggccatttgatgaaaaacggaaaagtgtatcaggaaaatggatggacatacgagaaaaaatagcatgaaaacggctcgcctgcagcagactgcggagcgagccgtttttttatgtctagtttaattcatcaaccagcgttctgattgccatttcgcgatccacattgtctgaaatcgcaatcggcgtaatatcaatggcgagaatgatcagaatcagggcacctgctgcagcaacataagaaacataatagaaatagttagcggtatcaacagtgttgacaagctcggcctgaactctggatgtatcatccttagaagcggcgatttcctttgcagcttctactttttcttcaacgatttgacctgcttttttcagcagttcatccactttcaatgcatctttgctgtaaacagctttcttcaggttatcaaaaaagtcagcatcctcttttttaatatcagcgacaacctgattggcaaaagcctttgcctgttttgtgttgagtttgtctgtcatcgctttattaaagacctctggaagctgtttgccaacttccccttgggcaaacacaaagcctttaaaaatttcctcacctgaatactcaagctgctttgcctgtgccacactttcttgctgcttcaccaaaaacacagtcgtcaccaatacaaccgacaaaaatactagaaacgccttcttcaaactgaaacctctcccttcttgtgttttttattccacaacagtctgcgaatatatgtaaattgaatcgtggaatcgataggagtgagatacaatatcaaaatgccggccatgataatcgaaaaactgatgaggcccagcatgactgcaaaaatctcatgcataaaaacagcgatgatcaaaatcaatctccaatgcttcttcggcgcaaacagtgccgcgaagatgacaatttgaaccagcagcgtcccccatgtcggaatcaccacgaacggacttgttacaattggcttcgttaacgcctgaaaaaagccgttgaagccaatggttttttcctgggcgaaataatagacggccgttccgtccacccattcctgctgagatagcttagcgacggtagagtgaaaataaagcaccgccacttggattctgatcacaaaataagaaataaaagctgttatttttccaagtgttcttttgccctctataggtctcgtactccaatgccattttctcggatcggtcagcgtgatgggaagcaataaaaaggtcatgactgctgctgcctgctcgcctccgtcgatgacgatcagcgatgactgcaggctgtaactgacataccaatgcagaaccccggtgattctggggcgccagccaatgacaacaagcaccagaatggcaatgcagacccatctgaaaagatttaacatcatatagttattttcgccgagacaaaagagactgagattcattttacaagctggatagctgctgatcccgctggctggcttcataatgaggctcgggtgattgatgagcagcgtcagcaggctggatagcgcaatgatgcttcgcgcgaggccatatacatttgtccacgggtttctttcgtcccatctggtgatggtctgttttatgttttcgagcatgagatcacaaccttgactatgctttttacctgataagacgaaggggtatatttagaatagctccaaggaacaatatcctctttcgtcaaatagtagctgccacaaagcagcgggcggggagcgggtgtttttaattgcacggttttggctttgcttttgcatgcgccgaggtccttttctttacatgctgtccactgttccttgccgacttggctgtagatcacgcccatttcaacgccttgtgaccgcccataccgatacaggccgaataggttgtcagccctcatattgggccatctgaccttggcgctggcattttcagcctcatataagccgattgcagtatcacgcggatttttgctaaaaaagccccagccctgagggaggatgctggacatgagaaatttggagtcctttgtcagcggaatcggggttgtccctaagctgccaataatagaaaacagaaatagcgaaccccaaaggattgaaaaaatgacaaaaaatgatatcgatttctgcattcgactgctccttttaacctgaagaatcgtttttacacttttcataatataaaaacatttatgtaataaaaaggttaaaaagtatgagaaattccatttttgttaaaaggaaaaacaggacattttacactgctatatgtgattgatatatagtgtttttttcgatatatttaaaccatgaaaacgaatcaagttaatgaccgctggattgttcaatttcgaaaagggattttcgagctggccatcctatccctactgcattctaaaccgatgtacggttatgagctgacgtcatccttaaaaaccacctcggctctggctatttcagagggagcgatttatccgattctgaaacgtatgaccgagaagggatggatcgaatttttttgggaagattcactggacggcccgaaaagaaagtattacaaaatgacacaaaaaggagaagaaatgttaaaagaacggctggagaaatacctggaaacccatcaagccttactgtctttatcgggggatttgctatgaatggacagcttatcattgaccgatacatggaggaactaaatgcagagctggagaatatgcctgatgtagagagagaaaacgctatcgacgaattaaaggggcatatcaccgctttcgttcaagacagaatcaaagccggccttagtgaagaggaactgcaggaagctgttgaatctgaattttctcatccgaaggagcttgccgaattgatgatgggtgatgggggagagacgaaaaggaggaggtctttattgggcaaaagctggctttcggtccttctcattgtcacgattatcgccctgccgctgctgccgtccgacttcagacatctgccgctggctgtttatttaatggtgctcgccggatatgtatggaagcggaaaaaattgatgatgtttgcaggtgtcagaaaaaacaaaatgcgctctcaaaaggagattgttacgatttcgcgagtcggtgcggtttatctgctgtttttagcagtggtgcttcttttgagcccgttcctcaatgcgcttgtcgtcctgctgctgattgcagtaagctgcgccgctttttttctttttcttaacatcaagtaatcttgtaggaggctgtaagatggaaatcagcatcaattatctattaattgtcatcgcgcttttattctttgtggttgcctattttgtcggaatcaaaaaacaaacctggatgctggctgggtttaacgaggcgcgtatacgggataaagaccggctggccagaatagcaggctactttttcttgaattccggtttgttcattttgctgaatagttttatctcatttcaaggtcaggagcagctcatacctccgcttatactggcatatggagcaggggttattatttatgtcaataaaaaattagtagagtagaaaaagaagggcagagcgaaatatctctgcccttcttttttgggaaaataagaacgaagcaccacatacaagtttttgtatttttgataggatgaagaaaaatggtagattccaaaataggaaggatgtggtgttttgcgcaacctgaccaagacatctctattactggccggcttatgcacggcggcccaaatggtttttgtaacacatgcctcagctgatcaaagcatcaaatacgaccatacgtatcaaaccccttcatacatcatcgaaaagtcaccgcagaagccggtacaaaacacaacccagaaagaatcgctattttcctatcttgacaagcatcaaacgcagtttaagctcaaagggaatgcgaacagccattttcgtgtttcgaaaaccataaaggatccaaagacaaaacaaacgttttttaaattaacggaggtttacaaaggaattccgatttacggctttgaacaagcggtcgcgatgaaggaaaacaaacaagtgaaaagtttctttggaaaggtgcatccgcaaatcaaggacgtctccatcacaccgtctatttctgagaaaaaagcaatacatgcagcaaggcgtgagctcgaggcttccattggaaaaatcgaatatcttgatggggaaccaaaaggcgaattatatatctatccacacgacggtgaatatgatctcgcctaccttgtgagactctcgacatctgaacctgagcctggctattggcattatttcatcgatgccaaaaacggaaaggtcattgagtcctttaatgccattcatgaaacggcaggtacaggaatcggcgtatcaggtgatgaaaaaagctttgacgtcagagaacaaaatgggcgcttttatttggctgacgaaacaaggggaaaagggatcaatacatttgacgcgaagaacctgaacgaaaccttgtttacgcttttgtctcaactgatcgggtatacgggcaaagaaatagtcagcagcacgtccgtatttaatgaacctgcggctgtagacgcacacgcaaatgcgcaagccgtttacgattattacagcaagacatttggccgtgattcttttgatcaaaacggagcaaggattacgtctaccgtgcatgtcggcaaacaatggaacaatgctgcgtggaacggtgtccagatggtatacggggatggagacggttcgaaatttaagccgctgtctggatcgctcgacattgtcgcgcatgaaatcacacacgcagtcacacagtattccgccggtcttttatatcaaggagaacccggtgcattaaatgagtccatttctgacattatgggcgcgatggctgaccgtgatgattgggagatcggcgaagatgtctatactcctggtattgcaggagattcattgcggtcattggaggacccatctaagcagggaaatccagatcattactcgaaccgctacacaggaacagaggattatggcggagtccatatcaattcgtccattcacaataaagcagcttatcttcttgcagaaggaggcgtgcaccacggtgtacaggttgaagggattgggcgtgaagcaagtgaacaaatttactatcgggctttaacatattatgtaacggcatctacagatttcagcatgatgaagcaagcggcgattgaagctgccaatgatttatacggtgaaggctcgaagcaatcagcttcagtcgaaaaggcgtatgaggctgtcggcattctatgagcaaacaaaaacagtcaggacacagagtctgactgtttttgtttgctcattttcttaaaaagaatatcgccaatgtacctggaccggcatgcgagccgattgctgaactgattggatgcataatgatttctttcggcttgaacgcttcctcaatcaggtgtttcatgtccgtggctttttctttgttcgcggcgtagctgatcccgacggtttgatcgctccaatcatccccgcgctctttcataagctcgatgatccgtttgaaaagtttcttctgtccgcggattttttccagaggcacaagcttgccgtcctccatctgaagcagcggtttaatattcaacaggccgccgacaaaagcggacgttttggatatccggccgcccctcgcgagatatgttaaatcatcaacggtaaaaatgtgttcaagctggctgcaaaagttctttacagacgtttcaatttcttgtattgtattcccgttgatacagagatcggcagcatgccggacagccagaccgtatcctaatgaagcgcatttggaatcaatgacccgcaaatcgaaatcggggaattcctccttcacttcattggcgatcattacagctgtctgatacgtgccggagagacctgaggaaaaggcaatgtaaagagcgggatcacctgtttcggcatattgcaaaaacacatttttaatcgtttgcggtgaggcttgggacgtcttaggcgtttctccattttgcatcgcttcaaatatttgatccgcatgaattgtgactgcatcttcgaattctttatcgccgagagaaaccctgagcggaataaagccaatgcctttttcttcaaaataagaacgaggcaaatcagtggcgctgtcagcgatgagatgaactgtcatattgcttcccttctttccgttatcgctcgttatcatgagagttaagccaactatatcatattaatttgccaaaatcgtgttcaaatatttgttttaagggaaaacataataaagaagaaagagcggaggaacatgccatggtactagatcaaacaaaaaaattactcatcgtcatcatcggcgctttactcaatgctgccgggctgaacttatttttgattccagcagatgtatatgccagcggatttacaggtgttgcccagcttttatcaagcgtcgttgatcaatatgcccccttttacatatcgacgggaacgctcttgttcctcttaaacattccggtcggtattttaggatggctgaaggtcggcaaatcgtttacagtgtacagcattttaagtgtcgcactcactactctgtttatggggatcctgccggaaacaagcctgtcacatgacattttgctgaacgcggtgttcggcggcgtcatttccgcagtcggtatcggcttaacattaaaatacggagcttcgacaggcgggcttgatatcgtcgccatggtgcttgcaaagtggaaggataaacccgtcggcacgtatttcttcattctgaacgggattatcatcttgacggcaggattattgcaaggttgggagaaagcattatataccctggttacactatatgtgacaacgagggtgatcgacgccattcacacccgccacatgaagcttacggcaatgattgtgacgaaaaaagcggacgaaatcaaggaagccatttacggaaaaatggtgcgcggcatcacaactgttccggcaaaaggagcttttacgaacgaacagaaagaaatgatgattatcgtcatcacgaggtatgaactgtacgatttagaaaagatcgtcaaagaagttgatccgaaagcatttacgaacatcgttcaaacgacagggatttttggtttctttagaaaagactgacgaaagcaggtggaagtcgtgaaacggctgcttgtgatgctcctccccgtgctgcttttgataggctgcgggaaagatgagcagacagaacccgataaggaggtatcaggcggaatggagaatcaagaggttgttttatctattgacgcaattcaggagcctgaacaaatcaagtttaacatgtcgctgaagaaccaaagcgaacgtgctattgagtttcaattcagcacagggcaaaaatttgaacttgtcgtgtatgattctgagcacaaagaaagataccgttattcgaaagacaaaatgtttacgcaggcttttcaaaacctgacgcttgaatctggagaaacatatgatttctctgatgtgtggaaggaagtcccggagcccggaacctatgaggtaaaggtgacatttaagggcagggcggaaaatctcaagcaggttcaggctgttcagcagtttgaagtcaaataagaggctatggcgagtcgccatagcctttttttattggagtttgtccagctgattttgaaattgatgcagctgttgacgttccgcatctgtcgaattggcatacgcagaagatacagcatttttggctctcagaatcgcttgctcctgatcgccttcctcaaagccgtttgtcaccatgaccgcctgttgaacaaatgattttgcctgctgaaacagttcatttctcatttaatattcaacctggctttcggccgagtctcgtgccgcggcatgctggtgagcttcttctaaagtagaccgatatggaaatcttgcggcgtgtagcccgatggagtctttaccctgctgaataaaccttctggatttgcttcgtttacccattttgagactgcccccttccatactttgacgagatgagtcgtcttcaatagtatggtggggcaaagtaaggtttatgagtgggaaaaattaatacggaccttctttaaagtgagaaatattctttcaaaaatcttgcaacgccgtcctcttcatttgtagccgttgttcggttggcaatctgcttgaccgcgtcaattccatttcccattgcaacgccgcagcctgcaaattcaagcatttccaaatcgttatcctcatccccgaaagcaatgatccgctccctcggcacgccgtaataatcgctgattttctgcaggccgaccgctttattcatgccgcttttgataatttcaatgacatgccacggtgcggcccatcttctatggtcgattacctcggcatgcacatccgataaatatgagcgtattgccggcacatcttcttcttttgcatgtatgagtacagacgtcacatcttcaccaagattttcccgcaagtctccgaccgttacatttgttgtgttcatgttaaaggcatctatcaggtgctcatcatggtaatgaaagtatacgtcgtcaatcacttcagcaagcacgttatgtacgttgtagctctcgctgatatccacgagctgtttgacaacatcaagcggcagtgacgtatgataccgtccccagctgtcgtcttgcggatgatggacaaatgctccgttaaaattgacaattggcgttgtcagctccatctgctggtagtacatggaacttgaacgatacggacggcctgttgagatgcagacataatgcccgtcatcttttaggcgctgtatcgtatgaagggtgttttcagatatggttttatcatcctttaataatgttccatctaaatctaatgcgattaaatagggttttgtctccatgaaaagctcctttaaccttagattttgcttgttttgccttacttacagtgtagctttttaccatctttattgtctacatgttacacttatgattatggttatcctaaggaggggcacattgtgatacaaattgagaatcaaaccgtttccggtattccgtttttacatattgtaaaggaagagaacaggcaccgcgctgttcctctcgtgatctttatacatggttttacaagcgcgaaggaacacaaccttcatattgcttatctgcttgcggagaagggttttagagccgttctgccggaggctttgcaccatggggaacggggagaagaaatggctgtcgaagagctggcggggcatttttgggatatcgtccttaacgagattgaagagatcggcgtacttaaaaaccattttgaaaaagagggcctgatagacggcggccgcatcggtctcgcaggcacgtcaatgggcggcatcacaacgcttggcgctttgaccgcatatgattggataaaagccggcgtcagcctgatgggaagcccgaattacgtggaactgtttcagcagcagattgaccatattcaatctcagggcattgaaatcgatgtgccggaagagaaggtacagcagctgatgaaacgtctcgaattgcgggatctcagccttcagccggagaaactgcaacagcgcccgcttttattttggcacggcgcaaaagataaagttgtgccttacgcgccgacccggaaattttatgacacgattaaatcccattacagcgagcagccggaacgcctgcaatttatcggagatgaaaacgctgaccataaagtcccgcgggcagctgtgttaaaaacgattgaatggtttgaaacgtacttataaagcacgaagttattaacaagagctgaatttacgttatactgtagaaaaaaggagtgagggaacgtggaagaagcattaaaagaaaacatcatgggcgccctggaacaggttgtcgatcctgagcttggcgttgatatcgtgaaccttggtttggtatacgatgttgacatggatgaagacggcttaacgcacgtgacgatgacactgacatcaatgggatgccctttagcgccgattatcgtggatgaggtgaaaaaagcattagcggaccttcctgaagtgaaagacacagaggttcacattgtatggaatccgccttggactagggataaaatgtccagatacgcaaaaattgcgcttggcattcaataaaacaaaagaggacagcctgacatgtgaggctgtccttttttacagctgaaaggagtgaaaggaaatgatgtacctgctggcagttttatgcccgccgcttgctgttttgttttcgggaaaaccgtttcaggccttgctgaatctcatattgacctgtatcttttggctgccgggcgcgattcacgcctgctttatcgtcgccgaccgccgtgccgaaaaacgggcaagaagataatttgggaaaatgaggatgcagtcatggtataatggtcataaaaacagcagggagagcactatgaaaaagaaattgcttgcattcgcgctttgtactggcgcgtatgcggccctgtttgcgtactctgtgcactcagagcaaaaaacagacacaagcgagatgacggatgtcagccgcctgatgcctgtaaaaataaagcagacagtgaaagggcaggaagaggaaacgctcattgacacagtcaaagaggcaaatcgaaaaaacataaaaatttcaatcgccggggcccagcactccatgggcggccatacatattatgaggacggcatcgttctcgacatgacgggctacaacaaaatcctgtcactcgatcaagagaagaaaaccatcagggtgcaaagcggtgcaacgtggaatgatatccagaaatacgtgaatccatacggactcgcggtaaaagtcatgcagtcacaaaacatttttacaatcggcggatctctcagcgcaaatgcacacggacgtgatattcgctacggctcgctgattgatacagtcaaatcattccggcttttaaaagctgacgggacgattatcactgtcactccaaaagatgatttgtttacggcggtcatcggagggtacggcctttttggcgtgattcttgatgtaacgcttgagctgacagatgatgagctgtatgtcatgaagacagaaaaaatgaattacagcacatactcagactatttttcaaagcatgtaaaaggaaatccagatgtccgaatgcatctggcgcgaatttcaacagcgaaaaaaggatttctgaaagacatgtatgtcacaaattacgtattggctgatcatcaggatcagctgccatcatacagcgatctcaaagaagatgagtatacgggagccacaaagtttgcactcggtttgtcaagacagtatgaatggggcaggaattggctgtgggacacacagcaatcctatttcctgagccaaaacggcacagagatttcacgcaataacgtcatgcggtccgaatcaaagtttcttgagtatgaaaacaatgacaacacagatgttttgcaagaatactttgtgcccgtgaaggagtatgggtcctatattgatgacctgagacaaacgctgtcggacgaagatctgaacctgctgaacattacgatccgctacgtgcagaaaaatgaaaaggccgacctttcctatgcgaaggacgatatgttttcgctcgtgctattaataaacgagggcttttcaaaagaagaccaggcagataccgcccgaatcatcaggcgcatgacagacgttgccatcaagcacggcggcagctattatctgccttatatgacctaccagacaaaagcgcaaatgagacaggcatatccgaaaagtgaagcgttttttcagaaaaaacgaacctatgacccgaatgagcgctttatgaattacttttatcagaggtataaataatggggaaaaacaaattaaaatggctgacattatcacaaagcagcgtgtttttcgcaagcagcttaatctttccgttttatattctgtttgtgaaaaatatcggctcaagctacacacagttcggtttttcctacggattgttcgggttgagcggagcgctcatttacccgctcctcggacggctgtctgaaaggtttgacagccgttattttctgcttctgaactcgtgggggatggctgttctgcttttatatgtcccgcatatcggaagcgtcgttcaagtgtatatcgtccaagtgctgttagggctctttggagcgatgcaaaagcatggagaaaaagtgctgatcgctaattttacagacagcggagagcgtggaaagaagattgggaattaccatttttggacggctgtcttttcagcagcagcaattatgcttgggggctttctcgctgactttttcacagtgcaaatgattttttatgcaagctctattctatattttttgagtggattgatgatgatgaaaacaggctgacgcggtcagcctgtttttttatgcggctgaaaagcggtgctgcatcaacgtttttgtgctggagttgtgctgatttttttgagcggaatttccattgaacagaaaatttataaatgaataaaaatattaaatatacgattgaattaatttttattcatgttataatgttaaataatttcacaaagaccaagagggtgaacttgttttgaaaataggaattgtaggtgctacaggatatggaggcaccgaacttgtcaggattctctcgcatcatcctcatgcagaggaatgcatactttattcatctagcggagaagggaatgtctatagcgagggttatcctcatcttaccggcttagcggatcagaagctgaagccgattgatatgaatacgatcaaacacgaaatagatatcatgtttctcgctgcgccgcccggagtctcaagtgaattgactccaaagctggcagatgtgggaattccggttattgatctgtcaggtgatctgaggatacaagaaccggctgaatatgaaaaatggtataaacggacagcggcaccgaaggcggtgatacaagaggcggtatacggtctggcagaactgaatcaactgcaaattcaacaggcgaaactcattgccaatccaggctgttttccaacagctgttttgcttggcctcgcgccattggctcaaaagaaactgctcgatgaatctttcgttatcgttgacgcgaagacgggtgtttccggagcgggaagaaaagcatccatgggaacccatttttctgagctgaacgacaattttaaaatttacaaagtcaatgaacatcagcacacgccggaaattgagcaggcgctgaatgaatggcagccaggcctcgggcccattacattttcggctcacttggttccgatgacaaggggcatcatggcgacgatgtataccagattaacctgtgatctatcagcagatgacctgcatgatttatattcggaattttaccaagattcatattttgtgagagtgaggccaaaaggtcagtacccgcaaacgaaagaagtgtacggcagcaatttttgtgatatcgccgtgaccctcgatgagagaacgaacagagtcacgatcgtctcggtaatcgataatttaatgaagggtgccgccggtcaggcagtgcaaaactttaatttgatgaatggctggaatgaagaaactggactcactatcacgccaatttatccatagaacgggagagaatcgaaccatgattcagttaagtgaagatcaaattgtaaaagtaacaggggatgtatcctcgccaaaagggtttcaggcaaagggtgtgcattgcgggctgcgctactcgaaaaaagacctcggcgtcattatcagcgagacaccggctgtgagcgcagcagtttatacccaaagccactttcaggctgctccgatcaaagtgacactagacagcttaaagcacggaccgacactgaaagccgtcatcgtcaacagtgccattgccaatgcctgcacgggagaacaaggcctaaaggacgcatacacaatgcgggagagttttgcttcacagcttggcattgagccggagcttgtcgctgtttcatcaacgggtgtcatcggcgagcatttagacatggaaaaaatccacgcggggatcgagctgctgaaagaaacacctgcgggatcaggcgattttgaggaagcgattttaacaactgatacggtgatcaagcagacgtgctatgaactggcaatcggcggcaaaacagtcacgatcggcggagcggccaaaggctctgggatgatacacccgaacatggccacgatgctgggatttgtgacaactgacgcggcaatcgaagaaaaagcgctgcaaaaggcgcttcgggaaatcactgacgtttcatttaaccaaatcacagttgacggagaaacatccacgaacgacatggtattagttatggcgaatggctgcgccgaaaacgagtgcctgacagaagaccatccagactggccggtctttaaaaaagcgctcttgctcacttgtgaggatctagctaaagagattgccagagacggagaaggcgcgacaaaactaattgaagcccaagtacagggagcgaaaaacaatcttgatgcaaacgtcattgccaaaaagattgtcggctcaaatcttgtaaaaacggcagtatacggaacagatgccaactgggggcggatcatcggagccatcggacactccgcagcacaggtgacggcagaagaagtagaggtttatcttggcggccaatgcctgtttaagaataacgaacctcagccattctctgaatctatcgccaaggaataccttgaaggagatgaaatcaccattgtcatcaagatggctgaaggggacggaaacgggagagcgtggggctgtgacctgacctatgactatatcaaaattaacgcgagctatcgcacgtaataaaggggagcgaaatgaagaaaacaatcgtttttaaatgcggtggaagtgtcatccgtgagctgtcggaggaattttttcaaaatctgaaagagctgatggcgtcaggctggaagctggcgatcgtacatggcgggggaccggaaatcacgaatatgctgaaacggttaaatatcaagacagagttttcgggcggacagaggaaaacaacgaagccggtgctggaagtggcggaaatggttttatccggttctgtcaataaatttttcgttgctgagcttgccaaacacggactgcgagccgcaggcatttctggtaaggatggaggtcttttggaggctgattatctagatccggaaacatacggagaagtgggagaaatcaaaaaagtcgatgcgtccatggtgaacgcgctgatggaaaatggcatcatccccgttattgcgccgctgtctatgacaagcgactgcaaaacgctgaatgtaaatgctgatctggctgcttcagcagtcgccggagcgcttgaagccgataagctgatgttcgtcacggatgtcgatggaatcatgaaggaaaagcaacgtctggacgtcctgacccctaaggagattcagatgctgatcaagcaggaagtgatcaccggagggatgatcccgaaggtcaattcagccttgtcagctttatcagatcaggtgtctgaagtcatgatcgtaaacggaaaaggttcattcttcgcagaacaaacctttcaggggacaaaaatcgtcaaagcaaaggaggctgtttcatgagcagcttgtttcaaacctacggccgttgggatattgacatcaaaaaagcaaagggaacgtacgttgaggatcaaaacggcaaaatgtaccttgatttcattcaggggattgcggtatcaaatctaggacactgccatgaagcggtgacagaggcagtcaaaaaacagcttgacagcgtatggcacgtatccaacctgtttcaaaacagtctccaagagcaagcggcgcagaagctggcagcgcatagtgcaggagatcttgtctttttctgcaacagcggcgcggaggcgaatgaaggtgcgataaagcttgcccgaaaagcaactggaaaaacaaaaatcatcacttttcttcagtcgttccatggccgcacgtatgcagggatggctgcgaccggacaggataaaatcaaaacaggcttcggcccgatgcttgaaggctttcactacctgccatacaatgatccttctgcttttaaagctcttggggaggaaggcgatattgccgcggtgatgcttgaaacagtgcagggagaaggaggagtcaatccggcgagtgctgaatttttatcagccgtacagtcgttttgcaaggaaaagcaagcccttctcatcattgatgaaatccagaccggcatcggacggacgggaaaaggcttcgcatatgagcacttcggactctcaccggatatcatcacagtcgccaaaggattgggaaacggctttccggtcggcgctgtcatcggaaaaaaacagcttggagaagcgtttacccctggttctcacggaacgactttcggaggaaacatgctggcgatggctgctgtgaatgccacattgcaaattgtattccagcctgactttttgcaagaggctgctgacaaaggggcgtttttaaaagaacagcttgaggcagagctaaagagcccttttgttaaacaaatccgaggtaaaggattaatgcttggaattgagtgtgatggcccggttgctgacattattgctgaattgcagacattaggcttgcttgtattgccggccggcccgaacgtgattcggctgctgccgccgctcaccgtgactaaggatgaaatagcagaagccgtcagcaagctgaaacaggcaatcgctcatcattccgctgtaaaccagtgatttttttttcgatgtaaaggcataaaaattcatttttataattaattattcatcaagaggtgggctgttagatggaaggttatttagtgttagaagatgggacatcgttcagcggcgagctggacggtcatgaaaactgtacgggagaagctgtttttttcacaggaatgacaggctaccaggaagtgctgacagatccatcatataagggacagattattgtatttacctacccgctgattggcaactacggcataaatgaaaaggattttgaaagcaagaaaccgcaagtaaaagccgcggttgtctatgaggcgtgtgatcacttttctcattatgaagcggtatacagcctcaaggagtatttacagaaatggaacattccgctgttaacccatgttgatacgagggctgtcgtgaagaaaattcgggcaaacgggacgatgggtgcaacagtcacagcctctaaagaaggagctgagattgcccttcaacccgagaatgtggcagagcaggcttcagcccaggaaatcagcacattcggcgacgggaataaacatatcgctctcattgattttggctataaaaagtcaatcgcatcatcacttgtcaaacggggctgcaaggtcaccgtggtgccatacaagcaaatggaggccgtatacaacatcaaacccgatggcattgtgctatcgaacggacctggagatccgaaagccattcagccatatttaggaaagatcaaaagcatcatcagccgctttccgactctcggcatttgtctcggacatcagctgatcgcgctcgcgtttggagggaatacttttaagctgccattcgggcacaggggagctaatcatccggtcatcgaccgtgagacgaaacgggtctttatgacaagccaaaaccacagctatgtggttgatgaacagtcgattaatgaagaagagctcacgatcaggtttcatcatgtcaatgatacgtcagttgaagggcttgcccataaaaaactgcctgtcatgagtgttcaattccacccggaagcccatcccggacctgcggaaagcgaatggatttttgatgattatctaaagaatgtgataccagcaaggagagaaatcgcgcatgcctaaagacaccagtatttcaagcatattagtaatcggctcaggcccgatcatcatcgggcaggcggcagaatttgattattcaggcactcaagggtgcatcgcgctgaaggaggagggctaccgggtcattctcgtcaacagcaatccggcgacaattatgactgatgaagccttcgctgatgaaatttattttgagcctctgacagcagaaagcctgacagccatcattaagaaagaacggcctgatgggcttcttgccaatttaggcggtcagaccgcgttgaatttagcggtggagcttgaagaaacgggtgttttaaaagagcacggcgtcaaactcctcggcacatccgttgaaacgatacaaaaaggagaagaccgggaaaaattccgttcgttaatgaatgaattaaaacagcccgtgccggagagtgaaattgttgataacgaggccgatgccctccattttgcggaatccatcggttttcctgttattatcagaccggcttacacattaggcggaaagggcggaggaatcgcccctgataaagaagcctttacagctatgattaaacaggcgctattagcaagcccgatcaatcaatgccttgtcgaaaaaagcattgccggctttaaagagattgaatatgaagtcatgcgtgacagcaataacacatgcattaccgtctgcaacatggaaaatatcgatccggtcggcgtgcatacaggtgactctatcgttgtggcgccttcacaaacattgacagatgaagactatcaaatgctgcggacggctagtctgaccatcatttcagcacttgatgtcgtaggcggctgcaatattcaattcgcgcttgatcctttcagcaagcaatattacgtgatcgaagtgaatccgcgtgtcagccggtcatcggctctcgcatctaaagcgaccggttatccgattgcgaagatggccgcgaaactggcagtcggatacacacttgacgagctgaaaaatccgctcacaggctcaacttacgcaagctttgaaccggcactggactatgtgatcgtcaaatttccgcgctggccgtttgataaattcaaaaacgcagaccgcaagcttggcacaaaaatgaaagccaccggtgaagtgatggcgattgaacggaatttagaagcagcaatacagaaggcagccgcgtcgcttgaattaaaaaatatcgggacacaccttccagagctcagcggcttgtcaattgatgcgctatgggagttggcagtcactccggatgaccgcagatttttcgttgtcatggagctgttgagccgcagcgtctcgattgatgacattcatgcgaaaacaaaaattgatccgtttttcctgtatacctttaacaacatcatcaaattggaaaaccgcctgatggaagagggcggcgatctctcttttgacttattgaaaaaagcaaaggaaaaggggttctcagacgcaacgattgcctcattgatcggcaaaacagaggaagaggtgcgcgcgcttcgcaaggagatgggcattacaccttccttcaaaattgtcgatacatgcgcggctgagtttgatgcgaaaacaaactatttttactccacatatttcggagagaccgatggagatatcagccgcaaagagaaaaaacgcgcgctgattatcggatcaggaccgattcggatcggccaaggcgttgaatttgattacagtgcggttcacggcgtgctgacactgcaagagcttgggttcgaaaccatcatgattaacaataacccagaaacggtcagcaccgattatgaaattgcggatcgcctgtattttgaaccgatgacaacggagcatattgtaaacgtggcggagcaggaaaatattgattttgcaattgtgcaattcggcggccaaactgcaatcaatgctgctgaagcgctcgaaaaagccggcattactcttcttggcacatcatttcaaacgctcgacgtgttagaggatcgggatcaattttatcagcttcttgacgagctgggattgaagcacgcaaaaggagaaattgcttatacaaaagaagaagccgcttcaaaagcgagtgagatcggctatccggtgttaatccgcccatcttacgttatcggcggaatgggcatgatcattgttgactcgcaagcccagctttctcagctgctgaatgatgaggacagcatgccatacccgattttgattgatcagtatgtgtctggaaaggaagtcgaaattgatatgatttccgacggcgaggatgtctttatcccgacatataccgagcatattgaacgggcaggtgtccattcaggggacagctttgccattcttcccggaccgtccatcacgagcgggctgcagcagggcatgaaagatgcggcacaaaaaattgcccgaaaactttcatttaaaggcatcatgaacattcaatttgtgatcgacaatggaaacatactcgttcttgaagtgaatccgagagcgagccgcacggtgcctgtcgtcagcaaagtaatgggcgttccgatgattccgctcgccacacgactgctggcgggagcgtccttaaaagatctaaatccggaagttcaaaatcatcatggagttgccgtgaagttccctgttttttcttctcatgcaatccaggatgtggatgtcaagcttgggccggaaatgaaatcaacgggagaaggcatgtgtgtcgcatatgattctaacagcgccttgaaaaaaatctatacaagagtctggagtcaaaaaggaagcatttatttgcaaaacgttccggaagaagtgaaggagttagcagaaaacgcaggttttacaattcatgaagggacatttgcctcatggatggaacaggaaggaaaatcgctccacatcaatctgagcggttctgaagaagcacgcaaagaacgtttggaagccatgacgcacggcatccccgtctttacagaagaagaaactgtgcgggcgtttttacaaagcggttcaggccatccgcagcctgtatctctcaaagacctctataaaaaggaagtggcatcatgcacacagtgacgcaaaccagtttatacggaaaagatttattaacgttaaaggaccttagtgaagaggatataaacgccttgctcgcagaagccggtgagctgaaacaaaacaaaattcagcctatattccatggcaaaaccttggcgatgatttttgaaaaatcatcaacgcggacccgtgtttcatttgaagcgggcatggcgcagctgggcgggaacgccctctttctaagccagaaagatctgcagctggggcgcggtgagactgtcgctgatacggcaaaagtgctgtcaggctatgtggatgccatcatgatccggacctttgaacatgaaaaggtggaggaacttgccaaagaagctgacattccggtgatcaatggacttaccgataaataccacccatgccaggcgctggcggatctcttgacgattaaggagataaaagggaagcttaaaggcgtaaaagtcgcatacatcggtgacggaaataacgtggcgcactccttgatgatcggctgcgcgaaaatgggctgtgatatctcgatcgcttcgccaaagggatatgaagtgttagatgaagcagctgaagcggcaaaaacatatgcacttcaatccggctcttctatcacgctgacagatgatccgattgaagctgtaaaagacgcggatgtgatttattctgatgtgtttacaagcatggggcaggaagcggaagagcaagaacgtcttgctgtctttgcgccttatcaggtgaatggggcgctagtcagccatgccaagcctgactatacatttttacattgtctccctgcgcatcgtgaggaagaagtgactgcggagattattgacgggccgaactctgcagtgttccagcaggcggaaaaccgtcttcatgtgcaaaaagcactgctgaaggccattttatataaaggggaatcatcaaaaaactgctgagccaaactcagcagtttttttgatggcaacatattcacagccgcttaggcgcatactacagcaaaaaggaaaaggaggaaaaacagtgggacagcagcaccaattccggcccggacagaaagcgcctaataacggtgtctacgtagaaatcggcgagacagggagcatggttaaaaaccctcaaaaggtccatctgtcagcaggggaaatgttccccgaaacatcaaaccacaaccggctgtggacctacaaaagaaagccgtgaccactaaaaaacccaaaacaataaatgttttgggtttttggctttttaatgctggcttgcatttttgttcataggcatgatttctgctaaaaccatgattaagacatacagtacaacagcaatgacagatgatgttttgaaattatacgtaacgctgttcatgcttgcaaccaagtagcatgccatatgtgataaaaggaacgtccaaataaaggcaataatatatcgcacgtttccacctcgtccttctcattctattctaaaagttatcataccatacaaaaagcgaagggggaatccaattttagcagaaagtgaggtgacaaaagagtctgattcgtcacactttaatggtaaaatataaaacgtcaatcagtataatagccaaaaatgtaaaaggctaggactttaccttattcgtttcttttctatttacataagatagcgtgagatgaagtgtgaaaggaggcgggcaagcgatgggaataacggaaagatactttcaactgggaacggagcataatgtcattcatctgccctatcgcccgaacggcttcggcatctttatcttgggggacagaacccactttgtcggacatgattcaagcttttggcagcagcattatggcagaaatcagcttctgagcatgttgatgaatgaaggatacactctttttaacagcaatctgttcggaaggcattggggggcggaaaaagcagtcacctatgccaaacagctgatacattctgtactgaagcaggaaatcctcaatccgaagattcatattttagcagaaggcatgggtgctctcgtggccgatgaactgcttcgtttttccccggatcatatccgctcagccgcaatgttgaatccttgtctcgatcttcaggcacattatgaatcggaaaaagaaaataaatttttctataaacaatttttgaaagaagtatcgaaaagctacggaatttctgaaaaagaagcggaagcgcttcgttataaaacaattcaaagctacccgagcggcgtaccggttcatatatggcagcgtatgaccggatctccatatccctacagtgtacatgcagaagttttcaaggaaaaacagcaaaagcaaggctcaccggtcgacatgacatttcatttatttgagcatccaagcagaatttatgcatcaatttgcaaattctttcacagtcatgaaaaagaattatagagaatataatgacaacagccttctcttttgcggaggctgttttgttttgggaaatgaaaaaccggaagggcggcagatgcaatggaatcaacgctgattgtaggtgcggacgaatttttcggcctttcattatgtgagcgaatgatggatgaaggcatacatgttgacgttgttctggcggaaacagaagataaaatgagacaaatgtacttagaagaaagactcatgtggcttgggagaaatgaactctttcgccagcttgaacacattggagaccaaaattatgatacaatttgtatccagttcggaagttttttgcctttagaccaatgtgattctccttatattttagtatatgaagaagaccgaaaagaatgggaaaaacgtgaaaaaacaggctcggaaaaaaccgtgatcctgccgaaaatgtatgggccatggaaagaagaaacagaggaagacggctattatacaaatgacgtcgctgacgagttgctgagattcctgttagaaccaagccgtcatagcaaagatcagctttttgaattgcaagtcacagaaaaaacctcaaaagaagaagcaaaaacaaaaattatcgagtggaaaagacaattttcatcaattttcgacaaatattaagaaaaaccttccatgtttcgagttttctagatacaataaacgtataaaaataaacatgttatagcttgtcaaaaggagttgaacatgacttgatcacaaggcttgtcatgatcttttctgtcctccttttattgagtggatgtggacaaactccgttcaaaggaaaaattgagaaggtcggcatgctctttcctgatacgattaatgacctcgtatggggcacaaaagggtataaaggattactgaatatacaatccaaatacaatgtggacgtctattataaagaaggcgttaaaacagaagaagatatcataaatgcgattgaggattttcataagaggggcgtcaatctgctctacggccatgggagtgaatatgccgaggtgtttaacttggtcggcgaagattatccagatatggaattcgtcatttccaatgcgaaagcgaaagctgataatgtaacaagtgtccattttagcggggaagcaatgggcttttttggaggaatgactgctgcccatatgtcgaaaacgaatcaggtcggtgtaattgcttcctttacgtggcagcctgaggttgacggttttatcaaaggggccaagtatgaaaatccggatatagaggtaaatacgaaatatacggatcattgggatgatgatacaacagcagtaaagctttatcagaaaatgaagaacgaaggcgcggatgttgtgtatcccgccggagacgggtataatgttcctgttattcagcaaatcaaaaaagacggtctttatgccattggctacgtcacagatcaatcggatctgggcgagaataccgtattaaccagcacggtgcaaaatgtggacaaggcctatgaaatcattgctgaacaatttaataaaggcacccttgagggcggcgatcattactacgacctgaatacgggagtcgttgagatgggaacattcagcccgctcgtcgacaaagactttcagcaaagaatcgccaagctgatcaaaacatacaacaaaacaggcgagctgccaaaaaacgagtaatggagtgacgtcacatgcagcacgaaaaatcacttgaattcttgcaaattgccatgaaatatctccctgaagcgaaagaacagcttgagaaatcaggcattgagctctcaatggaggccatccagccgtttatgaatctatttacaacggtaatggcggaagcttatgagcttggcaagtctgacgctaaatctgaaacagaataagaagaagccacttttttgaaagtggcttttcacatgattttctttttaatagcggagagcatgggcgcaagctcctttaaagcgggcttgatttgatcaagagagttcataattgaaccgatttggtccataatatgcatgtaattaatcgtctcttcgtcgtttgtctgagaaacctgagaaacttcctcttgttgttcctcctccttctcttctgttggttttgctgcatcgccgaacatcattcttgaaaacacatccaactgcatacgcctcctttccatataccatactctatgagtaagatgaactgatagtttagacgaatatattgccatgtgaaaaaaaataggatagaattagtacctgatactaataattgatcacaacctgattgatcttctaaatttaagatataaaggagtcttcccttatgaaagctggaatacttggtgttggacgttacattcctgagaaggttttaacaaatcatgatcttgaaaaaatggttgaaacttctgacgagtggattcgtacaagaacaggaatagaagaaagaagaatcgcagcagatgatgtgttttcatcacatatggctgttgcagcagcgaaaaatgcgctggaacaagctgaagtggctgctgaggatctggatatgatcttggttgcaactgttacacctgatcagtcatttcctacggtctcttgtatgattcaagaacagctcggcgcgaagaaagcgtgtgctatggatatcagcgcggcttgtgcgggcttcatgtacggggttgtaaccggtaaacaatttattgaatccggaacctacaagcatgttctagttgtcggtgtagagaagctctcaagcattaccgactgggaagaccgcaatacagccgttctgtttggagacggagcaggcgctgcggtagtcgggccagtcagtgatgacagaggaatcctttcatttgaactaggagccgacggcacaggcggtcagcacttgtatctgaatgaaaaacgacatacaatcatgaatggacgagaagttttcaaatttgcagtccgccaaatgggagaatcatgcgtaaatgtcattgaaaaagccggactttcaaaagaggatgtcgactttttgattccgcatcaggcgaacatccgtatcatggaagctgctcgcgagcgtttagagcttcctgtcgaaaagatgtctaaaactgttcataaatatggaaatacttctgccgcatccattccgatctctcttgtagaagaattggaagccggtaaaatcaaagacggcgatgtggtcgttatggtagggttcggcggaggactaacatggggcgccattgcaatccgctggggccgataaaaaaaggtgaggtgcacacaagatgactaaaaaaagagtagttgttacaggacttggagcattatctccacttggcaacgacgtcgatacaagttggaataacgcaatcaacggtgtgtccggaatcggtccgatcactcgtgttgacgctgaagaatatccggcaaaagttgccgctgaattaaaagaatttaatgttgaagattatatggataaaaaagaagccagaaaaatggaccgctttacacaatatgcggttgtggctgcaaaaatggcggttgaagatgcagagcttaacattaccgatgagatcgcgccgagagtcggtgtttgggtaggctccggtatcggaggacttgaaacactagagtctcaatttgaaatcttcttaacaaaaggcccaagacgggtaagcccgtttttcgtgccaatgatgattcctgacatggcgacaggccagatttctattgcattaggagcaaaaggggtgaattcttgtacggttacagcatgtgctacaggaacgaactccatcggtgacgcgtttaaggttattcagcgcggtgatgcagacgtgatggtcacaggcggaacagaagcgccgctgacaagaatgtcattcgccggctttagtgccaataaagcgctgtctactaatccagatccgaaaacagcgagccgcccgtttgataaaaaccgtgatggctttgtcatgggggaaggtgcagggattatcgttcttgaagaacttgagcatgccctggcccgcggcgctaaaatttacggagaaattgtcggctacggctcaaccggagacgcttatcatatcacagcgccggcccaagacggtgaaggcggagcgagagcgatgcaagaagccattaaagatgcaggcattgcacctgaagaaattgattacatcaatgctcacgggacaagcacgtattacaacgacaaatacgaaacaatggcgattaagaccgtttttggcgagcatgcgcataaacttgcggtaagctctacaaaatcgatgacaggccacctcttaggagcagccggcggtattgaagccattttctctatcctggccattaaagaaggcgtgattccgccgacaatcaatattcaaacacctgacgaagaatgtgatttggattatgtgcctgatgaagcccgcagacaggaacttaattatgttctcagcaactcattaggattcggcggacacaacgcaacattaatctttaaaaaatatcaatcataatcaagccaaaccggctgcccttaaagggtagccggttttttttgtgtgcataggattaaaagaggaggcgatcacatgagtgtagaacaaacatatagctggctcaggaaggccggttcaatagatgatttggcgcattacattatcccgcttttttcaggtgcggagaaaaagaactggaagggcattctggggcatcttcagcatcatgggatgtttaaaaacataaaagagggtattcagacggtttccaagctgaaggaaaaaggtttttacggacatatccaaaaggaagaacagtacctcaaaaacaaatggcaaggtcctgatgtaccaattgttacgctgccggttgatgaacgaaacaggagaatccgtttagaattcggatcaaaatcaggactcgcctttcaagacaaaatgttcctttttctttcgtcagatttagattttgggtcggtatctgcccttatgacgcatgagtatcatcacgtttgccggttaggtcatctgacaaaagaggaaaaggatgtcacattacttgatacaatcatcatggaagggctggcggaatatgctgtttatgagaggttcggccgaagtcaaacggctgaatggacgacttggtatacaccggaacagcttcaggctttatatgaaaaaaagattgcgccccatcgggatatcaaacgggataatcgattatttccccagctgttattcggcaaaggatatcagccaaaaatgcttggatacgcagttggattcaatattgtaaaaaaatatttaaccgccagcaaggcaagcaccgcagacgggctgtccattcctgctgagacctttttggatgcaatgctttaaaaggataaaataatggaatttcattaataatattacatttatcctaaaaaattcttgattttgcaaaatgattgtaataatatacaactataaaatttttcgataattcaatattatttattatttctgaataaagggattgctttctcttgaaaacgtttgacaacaagaggggggaaaggggagctagcatgagcacacttttagaagtgaataatttaaagacttattttttcaggaaaaaggagccgatccctgcggttgacggagtcgattttcacatcagcaaaggcgaaaccgtcgcgcttgtaggtgaatcgggctccggaaaaagcattacttctttatcaattatgggcctcgtccaaagctcaggcggaaaaatcatggacggctctattaaactcgaagacaaagacctcacctcattcactgaaaacgattattgcaaaatccgcggtaacgaagtatccatgatctttcaggaaccaatgacctcccttaatccggtgttaacaatcggagaacaaattaccgaagtgctgatttaccataaaaacatgaagaaaaaagaagcccgtcaacgagctgttgaactcttgcagatggtcggtttctcccgggcggagcaaattatgaaggagtacccgcatcggctgtccggcggtatgagacagagggtgatgattgccatcgcactgagctgtaatcctaaactgctcattgctgatgaaccaacgacagcgctggacgtgacaatacaagcccaggtgctggagctcatgaaagatctctgtcagaagttcaatacatcgattcttctcatcacacacgacttaggtgtcgtgtctgaagctgccgatagagtgattgtcatgtactgcggacaagtcgtagaaaacgccactgttgatgacttatttttagaaccgcttcatccgtatacagaaggcctgcttacgtcaattcctgttatagatggagagattgataaattaaatgcgattaaaggcagtgtgcctacaccggataatctgccgccggggtgccgttttgccccaaggtgcccgaaagctatggataagtgctggacaaatcagccttcgcttttgacacacaaaagcggaagaacggtgagatgctttttatatgaggaagagggtgccgaacaatcatgacagcagctaatcaagaaacaatcttagagcttcgtgacgtaaaaaaatactttccgatccggtcaggcctttttcaaagaaaagtcggtgatgtaaaagcggtggatggtgtttcattttcgttaaaaaaaggagaaacactcggaatcgttggagagtcgggctgcggaaaatcgactgccggcagaacgatgatcagactgtacaaaccgacagagggccaaattctttttaaagggcaggatatttccaatctgtcagaggagaagctgcggaagagtgtccgcaaaaatattcaaatggttttccaagatccatttgcttcgttaaacccgagaaagaccctgcgttccatcataaaggagccgtttaatacgcacaacatgtataccatgcgtgaacgaaacgaaaaagttgaagagctgcttgcaagagtagggcttcacccgtcgtttgccggccgttatccccatgagttttcaggcggccagcgtcagcggatcggcattgccagagcactcactttgaatccagagctgatcattgcagatgagccggtttccgcacttgatgtatccattcaggcccaagtgattaacttgatggaggaattacaggaagaatttaatcttacgtatctatttatctctcatgatctgagtgtcgtccgccatatcagcgacagagtcggagtaatgtatcttggcaaaatgatggaactgaccggcaagcatgagctttatgacaacccgcttcacccatatacccaagcgcttttatcctccgttccggttacaagaaaaagaggttctgtcaaacgtgaacgcattgtcctgaagggagaactgcctagtccggccaacccgccaaaaggctgcgtattccacacaagatgtcctgttgcaaaaccgatatgcaaggaacaaataccagaatttaaagaagctgctcccagccactttgtggcttgtcacctttatagctaatgttgcccgcacagctttgagagggggtatgcacactacataaacaacagcctagaagaacgaacatttcaagagggggaatatctaatgaaaagacggaaaaccgcactgatgatgctaagtgtattgatggttctggccatctttttatcagcctgctcgggatcaaaatcaagcaacagcagcgcgaaaaaatcagcaggcaaaccgcagcaaggcggggatttggttgttggttcaatcggagcgccaacacttttcaactcattatattcaacagatgaatcaagtacagatattgaacaaatgatttacagctttttaacgaaaaccgatgaaaacttaaatgtcaaaatgtcactggcggaaagtgtgaaagagctggatggcggattgaaatatgacgtaaaaatcaaaaaaggcgttaagttccatgacggagaagagcttactgccgatgatgtcgtctttacgtacagcattccgcttaacaaggattacaaaggagagcgcggctctaactttgaaatgctgaaatcagtagagaaaaagggagattatgaggttttatttacgctgaaatacaaagaccctaacttctataacaatacgttagacagctacgggattctgcctgagcacattttaaaagatgtaccggttgcagagcttgaagataacgaatttaatagaaaaaatccaatcggctcggggcctttcaaatttaaagaatggaaagacggacaatacgtgaagcttgttgctaatgatgactactatgacggccgtccgtatttagacagtgtcacgtataaaatcattcctgacgccaatgcagcagttgcccagcttcaggccggagatattgatttctttaacgtgccgtcaactgactataagacagctgaatcgtttaataatgtcaaagtcgtaacagatttagcgttaagctatacgtatatcggttggaatgagaaaaatgagctgtttaaagacaaaaaagtgcgccaggcgcttacgacagctttagaccgtgaaacaatggtgcaaaccgtattagatggggacgggaaggtcgcttatatccctgaaagcccggtttcatggaactatccgaaagatatagaggttcctaaatttgaatacaacgtcaaaaaagctaagaagatgctgaaagaagccggctgggaagatactgacggtgacggcatcctcgataaagacggtaaaaaattcgagtttacactgaaaacgaatcaaggaaataaagttcgtgaagacattgcagttgttgttcaagaacaattgaagaaagtcgggattaaggtaacgccgcaaatcgttgagtggagtgcattagtagaacagacaaatccacctaattgggactatgacgcaatggttttaggatggagtttatcaacgttcccagaccattacgatatcttccattctagccagtctgaaaaaggcttaaataacatgtggtacaaaaaccctgaagttgataagcttctcaaagatgcaaaatcaatcagtgaccgtaacgaatactcaaaagcttacgaaaagatttaccaaaaacttgctgaagatcagccgtataccttcctttactatccgaacaaccatatggcgatgccggctaacttagagggttatgtgtatcatccaaaacgcgagttgtaccaaattgaaaaatggtggcttgcccaataatttataattttcccttgcaggggagggagtgcgtttccttcccctttgaatttgaaaaagaacaacgaaggggacaagaatatggttacatatattattcgaagaacgttatcttcgattcctattcttttgggaattacaattttgtctttcattattatgaaagccgctccaggggacccgatgacacttatgatggatcctacgatcagccaggcagacagggctcagtttattgaaaagtacggtctcaatgaccctgagtatgttcaatatttaaaatggctgggcaatatggttcaaggcgatttcggcacatccatcatcagaaaagggacgcctgtttcagaactgattttagcacggctgcccaacacactcctcttgatgctggtgtcaacaattttggcgctgatcatttccatcccattcggggtaatttctgcaaaaaaaccttattcgaagctggactacggcattacatttacttcatttatcggtttggcaatcccgaatttttggttcggtttgattttaatcatggtgtttgccgtgaatctcggctggtttccaaccgggggagtcgccacccttaactcagatttcagtatagtagaccggattcatcatttgcttttacccgcttttgtgctggcgacagctgatatggcaggcttaacgagatatacaagatccaatatgcttgatgttttaaatcaagattatatccggactgctagatcaaaaggtttcaaagagaatcgagtattatttaagcacggcttgcggaatgcactattgcctgttattacgattttcggcttaatgattccttcctttattggcggagcggttgtcgtagagcagattttcacttggccgggattaggaaagctgtttgtcgattcagcattccagcgcgattatccggttatcatggcaatgactgtgatctcggcggttcttgtcgttgtcggaaacctcattgcagacatcctttacgcgattgttgatccgcggatcgaatattaaaaggagggaaacagagatgtcagagctgcaaacaactccctcgccggagatcaggctgaaagaaaatatttcgaaaaagccagaaacaatgacaaagattttctgggaaaaattctcgaaaaacaaactggccattttaggtgccgttattctttttatcattattatgtctgctgttttcgcccctttaattgcaccttatccccaagagcagcaaagcctgcttgataaatataaggcgccgggccttgaacatctgatgggaacggataaatttggacgtgatattttcagccggatcctatatggagcgcgtgtctctttattggttggatttgcgtccgtagtcggttcgattttgatcggaacggttttaggagcattagccggatatttcagaggaatagtggatgctgtcattatgcgtgtagttgacattgtgttatccattcctgatattttcttgttgatcacgctggtcaccatcttcaagccgggtgtggacaaactgattttaattttctgtctcacaggatggaccacaacagcacgattagtaaggggagaattcttgtcgctccgttcaagggaatatgttcttgctgctaaaacaattggaacaaaaacgcacaaaattattttttctcatatcctgcccaatgcgttagggccgattatcgtgtcagctacgctgaaagtagggtctgttattctagctgaatcggcgctaagctacttgggctttggaatccagccgccaatcgctagctgggggaacatgcttcaagacgcacagaatttcacagtaatgattcaagcatggtggtacccgttatttcccgggctatttattttaatgaccgttttatgcttcaactttgtcggtgatggcctgcgggatgcgcttgacccgaaaaatattaaataaaaatgaatatcatatctgttataaaatatcaccaaatcagaaaaaaagcaggtctccttttgtcagaaaatatacaaagagatctgctttttatgattcttacataaacccactgattccagatttcctcaatctctttggaataatttctctatcccttgcctatactgtggacaacagtttttataaaagtgaggggttagagatgttatttcttcatgatgtgtgggtcaattggtttgaaggggaagaaaatggctacaatgtatgccactttcacgaatggcgcaaggaagatacggttgagcttttggatcaggtgccgctgttaagggtgccgtcagtactgtttcattacatagaaaacgatttgtcagagcttccgaaaggtttgcttgaagacgtacatcagaaatcgtacattcggaaaaatcatgagcggacaaagcttgagtattgttttgtcgtaacagacggaatcggcattttagctgtcgacacgatcggctacacgatccctgtcagaaaaagccgtctgatcccaagacaggagcagctcgtttatgaaatggtaaaagatgtagagcctgaaacatatgaatttgagccaaagaagctggaatcctccaaggaatatcacatcttatcattagcaccagaacatgtcagaggactgacaagaaaagaacggcaaatcaagcagctgatgtttatggcgcttgaccaattaaaagggctgaaaaaccgggcggaaattggttactggtacacagagtggaatccgcatatgtatgaacaaatcaaaaggatgagctttgaagagatttgggacatgctgtataacgaaacaattgaaggctggtcggacaagcacctagctttttgcgaaaacctaataaaaggacagccttttttcgaaaagctttgggaaatggaaaacgaatcaaaggtcaactgaaaaaaaccgctctttgcaaagagcggttttttgattagcgtctttttcttccaagacccatggcattctccatttttttcagcattttgtttgctgtccggttcgcccgttccgcgccttcatcaagaatccggtctaattcttcagattctatcagctcataatagcggtcctggatcggttttaatgcgttcaccacgacttctgccaaatcacctttaaactcgccgtagccttttccttcgtactttgcttcaagctcttcaattgtcgtattgccgaggattgaataaattgtaagaaggttggaaacgcccggtttgttttccttatcaaatttgacaatgccttcagaatccgttacagcgcttttgattttcttttcaagctgcttcggctcatccagcagggtaatataagctttctggttcggatcagatttgctcatcttcttcagcggatcattcagagacatgatgcgtgcaccgacttttggaattttcacttccggaatcgtgaagatgtcgttgtattttttgttgaagcgttctgcgagattccgcgtcagctcaaggtgctgcttttgatcctcaccgacaggcacgagatccgttccgtacagcagaatatcagcggccattagcggcggatatgttaacaggccggagacgacagcttcattgcctttggatttgtccttaaattgagtcatccgctcaagctcgccgatatatgcgacacactgcatcatccatccggcctgcgcatgcgcggggacctctgactgaataaacaatgttgctttttctggatcaagtccgacagctaagtaaagcgctgcgagattgcggatattctttctaagctcaagccggtcttgaggaacagttatcgcatgctggtccacgatgcaaaaatagctgttataatcatgctgcagttcgacaaactgcttcattgcaccgatatagttgccgagcgtcactgagccgcttggctgaatgcctgaaaaaatcgtttgtttcatgaaaacatcaacctcatttcttaaaacataataaaaaaggctcattcttcccctgtaaaaaagggacgaatgaaccgtggtaccaccctgattattccattaaaatgaaatcactctgacgtttgtaacggagactgctccggctgagcctacttttttccagttcggtcagctgctccaaagtccattccacattgcccgttatctgctcccagcaccgcagactctcttcaaacaggtgaaatgtgtactactctttttcatagcaagcttttcttttgattgcttcattataaatcaattataaccaattgtcatcatgaaaaaacattcttttttccagtaaaattgtaataatataaataacacgagtgttgtaaaatccttaaatgataactgctatcagcgtaaaaacaggcagatattatatgtaaaaagcaatatgggcagaagacacatgaaaaagtttttaatcaatttatgctttaaatggtagaaggatattatgttcatggaagaaaaactaacgaagtttaaatattttaaattgataaaataatattgcaataaattatttgtttcattataatgaacttgttcactctattgttacagcttttttacaaaaataatcagaaaagacggaacagaataaaagtttgtgaaaactcaggttcatttgtctgatatttctgaggatttagccgtaaggagctgaaaattattattagggggtttgcgaatatgaaaaaacgttggtcgattgtcacgttgatgctcattttcactctcgtgctgagcgcgtgcggctttggcggcagcggatcaaacggtgaagggaaaaaggacagtaaaggaaagacgacacttaacattaatattaaaactgagccgttctccttacatccgggattggcaaatgattcagtttcaggcggtgtcatccgtcagacttttgaaggattgacacgcatcaatgcagatggggagcctgaagaaggcatggcatccaaaatcgaaacaagcaaggacggtaaaacatatacattcactattcgtgatggtgtgaaatggtctaatggagaccctgtaacagcacaagattttgaatatgcttggaaatgggcgcttgaccctaataatgaatcacaatacgcttaccagctctactacataaaaggtgctgaagcggcgaataccggaaaaggcagcctagacgatgtggcagtaaaagctgtgaatgacaaaacgctgaaggttgaattaaataacccgacgccatatttcactgaattaactgcgttctatacgtatatgccgatcaataagaaaattgcagagaaaaataaaaagtggaatacaaatgccggagatgattatgtatcaaacgggccgttcaaaatgacggcatggaaacacagcggttctattactctcgaaaaaaatgaccagtattgggataaagacaaagtcaaactgaagaaaatcgatatggttatgatcaacaataacaatacggaactaaaaaaattccaagctggcgaacttgattgggccggtttgccgctcgggcagcttccgacagaatctctcccttccttgaaaaaagacggttctttacatgttgagccgatggcaggtgtgtattggtacaaattcaacactgaagctaagccgttagacaacgtcaatatccgtaaagcattatcttatgcgattgaccgtcaatcgattgttaaaaacattacgcaaggtgaacaaatcccggctatggctgcggtgccgccgacaatgaagggatttgaggataacaaagaaggctactacaaagacaacgatgttaaaacggcaaaagaataccttgaaaaaggcctaaaagaaatgggcttaagcaaggcatctgaccttccgaaaatcaaattgtcttataacactgatgatgcacatgcgaaaatcgctcaagctgtacaagaaatgtggaagaaaaatttaggcgttgatgttgagcttgataactcagaatggaatgtctatattgataagctccacagccaagattatcaaatcggccgtatgggctggcttggggacttcaatgatcctatcaacttcctagaattgttccgtgacaaagacggaggaaataacgatacaggctgggaaaacccagaattcaaaaaattgctgaatcagtcacaaactgaaacagatcaaaacaaacgtgcagagctgctgaaaaaagcggaaggtattttcattgatgaaatgccggtagctccaatttatttttatacgattccttgggtacaagacgaaaatctgaaaggaactattattactggaactggagaaatttacttcagaaacgcgtactttcaataagtcttatttgtgaaaacaataacctcaaggtatatggggacctatttcccatatacctttcttactgaggaatataaaaaagtaaaaaccatggaggtgttcccccttgctaaaatatatcggaagacgcttagtctatatgattatcacactatttgtgattgtaactgtgacattcttcttaatgcaagcagcaccgggcgggccattttcaggtgagaaaaagcttccgcctgaaattgaagcaaacttaaatacgcactatggcttggacaagccgctgtttgtacaatatgtcagttatttgaaatcagttgcaatgtgggatttcggaccgtcatttaaatataaaggtcagagtgttaacgacctgatcagttcaggtttccccgtttcatttactcttggagcagaagctattctcctcgctttagcattaggtgtattgtttggagtcattgcagctctttaccataataagtggcaggattataccgtcgcgattttaacgatatttggtatttcggttccgagctttatcatggcggctgttctgcaatatgtgttctccatgaagcttgggctgtttccggtcgcggggtgggattcctgggcatacacctttttgccttcaatcgcacttgcttccatgccgatggcgtttattgccagactttcccgttcaagcatgatcgaagtgttaaacagtgattatatccgcacagcgaaagcgaaagggctgtcccgcccagcggttacagtgcggcacgccattcgaaacgcgcttttgccggttgttacatatatgggcccgatggccgcacaggtcttaacggggagcttcattattgaaaccatttttggtatccccgggcttggtgcacacttcgtcaacagtattacaaaccgtgattatacggtcattatgggtgtaacggtgttcttcagtgtcatcctgctattgtgtgtattaattgtagatgtgttatacggcattattgatccaagaatcaagctttccaaagcaaagaaaggagcctaggccatgcagaacattccaaaaaacatgtttgaaccagccgcagcgaatgccggcgatgcagaaaaaataagtaaaaagagcctttccctctggaaagatgcgatgcttcgcttccgcagcaataagcttgcaatggtcgggcttatcattatcgtacttattatccttatggcaatttttgcgccgatgttctcaaggtatgattattcaactactaatctcttaaatgcggataagccgccttcaaaagatcactggttcggaacagatgatcttggacgggacattttcgtccgtacatgggtaggggcgcgtatctcaatctttatcggtgttgcagctgctgttctcgatttgctgatcggcgttatttgggggagcatttcaggcttccgcggaggcagaacggacgaaatcatgatgcgtatcgctgatatcctttgggcagttccttcattattaatggttatcttactgatggttgttcttccgaaaggtctatttacgattattattgccatgacgattacaggctggattaatatggccagaatcgtgcgcggacaagtgctgcagctgaagaatcaggagtatgtgcttgcttcacagacactgggtgcaaaaacatcccgtcttctgtttaaacatatcgtgccaaacgcaatgggttctattttggtcacgatgacactgacagttcctactgcaattttcacagaagcctttttaagttatttgggacttggtgttccggctccgctggcgagctggggaacgatggcttctgacggattgcctgcattgacctattatccgtggcgtttattcttccctgccggatttatctgcattacaatgtttggtttcaacgttgtcggcgacggattaagagacgcattggatcctaagttacgtaaataagggagtgatacgggtgacacgcctattagaagtaaaagatttagcaatttcatttaaaacatatggcggagaggtccaggcgatccgcggagtgaatttccatctggataaaggggagacgctggccattgttggagaatcaggttccggaaaaagtgtaacctctcaagcgattatgaagctgattccaatgcctccgggttatttcaaacgcggtgagatcctgtttgaaggaaaggatctggtgccgctgtccgaaaaagaaatgcaaaatgtccgaggaaaagagatcggcatgatatttcaggatccgatgacctccttaaatccaacgatgaaggtcggtaaacaaattacggaagtgctttttaaacacgaaaagatctcgaaggaagcggctaaaaaacgcgcggttgaactgctggaattagtcggtatcccaatgccggaaaagcgggtgaaccaatttccgcatgaattttcaggcgggatgagacagagggttgtcattgccatggcgcttgcagcgaatccgaaacttctgatcgccgatgagccgacaactgctcttgatgtaacgattcaagcgcaaattttggaattaatgaaggatttgcaaaagaaaattgacacgtccatcatctttatcacacacgatcttggtgttgtggctaacgttgctgaccgggtcgctgtcatgtacgcgggacagattgtagaaaccggtacggtagacgaaatcttctacgatccgagacatccgtacacttgggggcttcttgcatccatgccgacactggaaagttcaggagaggaagagctgactgcaattccgggcacgccgcctgatttgacaaacccgccaaaaggagatgcttttgccctgcggagctcttacgcgatgaaaatcgattttgaacaggagccgccaatgtttaaggtatccgatactcattatgtaaaatcgtggctgcttcatcctgacgcgccaaaggtagagccgcctgaagcggtaaaagcgaaaatgcgtaaactggcaaatacgtatgaaaaacctgtcttagtgagagaaggtgaatgaattgactgaaaaattattagaaatcaaacatttaaaacagcactttgtcacaccaaggggaacggtcaaggctgtagatgatttatcatttgatatctataaaggtgaaacattagggctggttggtgaatcaggctgcggtaaatcgacaacaggccgaagcattatccggctgtacgaagcaaccgatggtgaggtgctgttcaacggcgaaaatgtgcacgggagaaaatcgcggaaaaagctgctggaattcaaccgcaaaatgcagatgattttccaagacccatatgcatccctgaatccgagaatgacagttgctgatattattgctgaaggccttgatattcataagctggcgaaaacgaaaaaagagcggatgcagagggtccatgaactattggaaacagttggtttaaacaaggaacacgcgaaccgttatccgcatgaattttccggcggccagcgccaaagaatcgggattgccagagctcttgctgttgatccggaattcattatcgcggatgagccgatttccgctttggatgtatccattcaagcgcaggtcgtgaatttaatgaaagaactgcaaaaagaaaaagggctcacatatctgtttattgcccacgatttatcgatggtcaaatacatcagtgaccgcattggcgtcatgtatttcgggaaactggttgagcttgcgccggcagatgagctttatgaaaatccgcttcacccatatacaaaatcattgctttctgctattcctcttcctgatccggactatgagagaaatcgcgttcgccagaaatatgatccgtctgtccatcaattaaaggatggggaaacgatggaattccgtgaagtcaaaccgggacattttgtgatgtgcacggaagccgaatttaaagctttttcatgattcatcaatccttcaagagatttctcttgaagggtttttttgcgtcctcatagaaagtgagaatgataacatttacaattagaggaaaaaagcggaggcgaaatacgattcaatttctgcataacaaaaatgtttttgcgctattgctgtctcaatcttttcaatctttagcaggtgtcctcgtcacaatcgttttaatggtccgggtctatcaaatgactgactccgtttttttggcgggccttattttatcgttcatgtcgtttgcgagtatagcagcaagcttttgcgtctctccggtgcttcgcattctcggttttaaaaaggtgcttgcgggagcgaatctgctgagagcggtctttacaatcctgatggcatacagcgtcactcatcacggacaggcattcttttggattacgctgctgtttgtgttttgtttttccttcgcgggcgctttttttcagccggcaagatttgcgctgctgccgattattgttccaaagaagcaatatgtaaaagcgaatggtgtgatctccctctcgaatcaattgttcttaacagcaggctggggccttggaggccttctgacgtacgccgttccttttgaactcgttgtcggcgctgccatttgcctgtttgttctatcgggagcttccatcagtgtgttgcatgtaaatgaagaagaggctgcaggaactgctgaaacagcatctgtcagaagtatatggaaggatttaatgatcatccctattgtaagagacattactgtaatggacatgttagaagctttggcgggttccgtatggtcatctgctattctcctcgcatttactgcggctgttttgcatgaaacagaggtgtggtgggggatgtttaacgcttcctattttataggcgcaattgtcggcagtgtgattgctattcgtttttcttctttttttgagcggaatatgggctatgccattatgttcagctcgcttgtaatgtcggcgctgacccttttgttttcattttctccagtcccatttttatgcgctctggcttgtgctgcaatggggcctttttatcaggtgcgtgatatttgccaggaaaccatgctgcaggaggttattcccgagcagaaacgaatcggaatcatggctgcaaaaaatgcgattttgactccttggtcaggcgtcacctactccattatggggctagtggctgatgctgctggtgcgaaaatagcttttatcgcggctgctgcattatatatcatgacatttctgattgcactggcgcagccccgcctgattcattacaggcgggaaaaccgagttcaatgagatacacttcaaaatgaacggagcagctggctccgtttttgctgaaaaaaaatgaaaccatggcggaagttcgcacgtctttatagatgtaaggctgtttaaacaagaagaaatggggtatatctaaaagtatgaagacaacgaactcataaggagcaaatcaatgaactggtatgaaaagcttagcgagtactttccaattgaagaaatgaaatcaaaagcgcatatggaagctcttctgaaagagcgaagcgatatttatcataaagatgaaggcaaacatcatattttaatgtttgcggagttcgattcttttatcttcgttgattatctgtatgtgtctaaggatgcaagagggcaggggcttggcggcaaattgatcgcgaagctgaaaaagaaaaataagcccatattgctcgaggtggaacctgtggatgaagatgatactgatacagaaaaacgcctgaggttttatcaaagagagcatttcaagcatgctcagtcaattgggtaccggcgccggtcattggctacgaatgaagtaaacaagatggagattctgtactggtcaccaaaaacagaatcagaagaagaaattcttgaagccatgaaacagacatatgaaaacattcatacttataaagacgagaaatggtacggagaatcgtacgaaaaaacggatgaagtcctgaaactcattgatgaagaaaaacaaaaaaatattttcgatcagttaagctaattgagaattagaacatatcatgaacattaaaaatttgctggattgacacatttttttcttaggatactgttcacacttacttttttatagtataatacctgtaaagattccttttttagagtaatttcaatttaagaataaaatagatgttcatcctactaattagaggagtgaagatgaatggttacactatacacatcaccaagctgtacttcatgcagaaaggcgagagcgtggctcgaggagcacgatattccatttgtagaaagaaacattttctctgaacctttatcaattgatgaaataaaacaaattcttcgaatgactgaggatggaacagatgaaatcatctcaacccgttcaaaagtattccaaaaactgaatgtgaacgttgaatctatgccgctgcaagatttgtaccgcttgatcaacgagcatccagggttgcttcgccgtccgatcatcattgacgaaaaacgtttgcaggtcggatataacgaagacgaaatcagacgtttcctgccaagaaaagttcgctctttccaattaagagaagcacagcgtttggcaaactaatagatcgtatcatcaaaagaaggctgagtcatcagccttcttttatttttcaacctgctggtaataaatgctcgcaagaatgacaaacgcaaccgtcaaaatggggaggagcgtttcaactgtgccgtgctgcgccataaaaagagacagctttttgtctctgacaatcatttctccgccagtataagcaagcagcccgcttcccgcgtaaatcagaagcggtattttctctagtgcaatatggatgagtttgctgccccaaataataaccggaaccgatacacacaaacctataacaacgagagaaaactcaccgtgtgatgctcccgcaactgcgatgacgttgtccagcgacataaagagatctgcaagcacaatcgttcgtatcgctctccacagggaggtgctgcttttaatgtgcttcgtgtcttttttttcaatcagcagctgatatcctaaatacagcaggaaaattccgccggcgcactgcaagaacggaatgttcaaaagatatacagctgcacttgttaatccgattctcatggcaacggcaataaatgttccgagaataatggcttgctgtctttgcttgtccggcaaatgtctgctggccatggcaataacaaccgcgttgtctccgccgaggatcaggtcaatcccaacaatgacaagcagagaaatcagatagtcatgctccatgaagcggcacctcgctttcagtccttcgcttgtactactactatatgagacaggttgtattttatgatatcagccgcctgaactgccgttttttaggaaaaggtgcatttttatttcttttgtgactgttttatcataaaatagaaatacaaaggaattcacactggccttggttaaggttaagatgtggacggaatgggtaaagtgtagtaaagtacaattaatcgggagcttagatgtcccttcaacatcttatatagaagggaaggttggcaaatggaaattgaaagaattaacgagcatacagtaaaattttatatgtcttacggagatattgaagatcgcggttttgacagagaagaaatttggtataaccgtgagcgcagtgaagaacttttctgggaagtcatggatgaagttcatgaagaagaggaattcgctgtggaaggcccactttggattcaagttcaggcactggacaaaggattagaaatcatcgtcacaaaagcccagctttccaaagacggacaaaagctcgaactgccgattcctgaggataaaaagcaagaaccagcatctgaggatcttgacgccttgctggatgatttccagaaagaagagcaagccgtcaatcaggaagagaaggagcaaaagcttcaatttgtcttgcgatttggcgattttgaggatgttatttctctatctaatttgaacgttaacggaagcaaaacgactttatattcgtttgagaaccgatattatttatatgtagatttttgcaatatgactgatgaagaggttgaaaatcagctaagcatcctgctggagtacgcaaatgaatcctcaatcagcatacaccgtcttgaagagtacggcaagctgattatttcagagcatgctctagaaacgataaaaaaacactttgcatcatagcaaaccgatttccttccggaaatcggttttttttatgcacgaaaatgccattttagagatgtgaaaaatcaaaaacatatagacaagcggaaaatacagcgaacaggagttgatcatcttttccagaaagtatacttcatctggaaaggagagatgacaattgtttagtgctgtgactgaagacggccaaatgtttcaccttctaggcgctcagcaaaaccagaaattaaagcggagacggttcttctgtccggtatgcgggggagagctagctgtgaagctcggacttcaaaaagcgccgcattttgcccataaacagaacaagtcctgctccatagatatcgaaccggaaagcgcctaccacttagaaggaaaaagacagttgtatgtatggctgaaaacgcaacgggcttcaccaatattggagccgtatataaagacaatcaaccaaagaccagacgtcatggcaaggatcaaggagcatatgcttgctgttgaatatcaatgcgccactatcgctccagatgtctttcaaaagcggacagagggcttcaaacaagaaggaatcatcccgcagtggattatgggatacagccgcttaaaacggactgcttcgtccttttatcagctttcagcttttcattggcagtttatcaatgcaagtccatacagagaactgatatgttattgtcctgaaaggcgttcttttctccgactcagccacatcattccattctacacaaaccattcttattcctcagtccaaacgatccctatccatcgggcaggtgcagacgatctttttttcactgaaccgaaaccctcaattcaatattcaggctggacgaaagcgattcaccgttttcgccataaaccccatcggtttaactctaaggaaacaaatcgccttaggcagatgttttatgagaagcggcagacatctttttcttttctgccgactgaagtgtttgttcctgttagaaaaggggcagtttttaagagtccggtttttgtgtggcaggggtttctttatttgtttatgacggatcttggagataaacgtgcgccaattcgtttttcagctgttttgcagcagtgcaaactgcacattcataaaaagaacattgcactcaggttcgaatgcagcgaagagtgtctttcagaagcggttaaacagtatattgattttttgtgcaagaagggatttttaagggagactcagaaagaagtatatgtgctgaatcggcctgcaggcggcatacattcaatgcaggatctcatagaaagagaccgcagctgttttatagaatgagtttgtctgatttggctcaccctaagacaaaggtggtgggcaggctgtgaaaggcacaaaaggaaaggtttttcgtgtttttactgcttttttggcattcgttctcttcattactgcatatgatttgacaaaaggcagtgaaaaaccggaagatattcacaacacaagtttattgagaaacagctgttttttcaattggcttgaatcaaagaagacgagggggatcaccatggctgaggaaaaaaaagcaaaccaactgcctgacagaagtgaggtaaaggcagaagacacatggagacttgaggatatttttcctagtgatgaggcctggaataaagaatttcaagctgtaaaagaattaattccgaatttatctaagtataaaggaaagctggcagattcagctgatcatttatacgaggctcttacgtatcaagataaagtgatggagcggctgggtaggctgtacacatatgcgcatatgcgctctgaccaggatactgggaactccttttaccaggggctgaatgacaaggcgggaaacctgtatacacaggccgcaagcgcgacagcttatttggttccggagattttatccatagaagaagacaaactgcagcagttcattcttgaaaaagaagaattgaagctgtactctcatgcgattgaggagattacaaaggaacgtccgcatgtgctgagcgagaaggaagaggcactgcttgctgaagcctccgaggtactggggtcatcttcaaatacattcagcgtgttaaataacgcagatataacgtttccgtccattaaagacgaagatgggaatgaaaaacagatcactcacggcaactttattaatttcttggaaagtgaaaaccgtgaagttcgcaaaaatgcgtttgacgcagtgtataaaacgtacggacaatataaaaacacaatggccacgacgctaagcggcactgtgaaaaaggacaacttctacgcgagagtgaaaaagtacaagtcagcgcgtgaggctgcgctttctaacaacagtattcctgaggaagtatacgataaccttgttaagacgattaataagcatttgccgctcctgcaccgctatattgcgctaagaaagaaagtgcttgagcttgatgaagtgcatatctatgacctgtatacaccgcttgtgaaagatgcggggatgaaggtgacatacgaggaagccaaagattacatgctgaaaggcctcgcacctttaggggaagaatatgcctctatcctaaaagaaggactggaaaaccgctgggtggacgtttacgaaaataaaggcaaacgcaatggggcttattcatcaggagcttacggcacgaatccgtatattttgatgaactggcataataacgtcaataatctctttacgctcgtgcacgagtttggacattccgtacacagctactatacgagaaagcaccagccttatccatatggcaattacagtatctttgtcgcggaagttgcctctacgacaaatgaagcgctccttggcgaatatttgctgaacaatttagaggatgaaaaacagcgcttatatattctcaaccatatgcttgagggcttcaggggaacggtcttcagacaaacgatgttcgctgaatttgaacatctgatccatacaaaggcgcaagaaggcgagccgcttacacctgagcttctgacaaatgtctattacgacctgaataaaaagtattttggagacggcatggtgattgataaggaaatcggccttgaatggtcgcgtattccgcacttctattacaattactatgtgtatcagtatgcgacagggtacagcgctgcccaagcattaagcagccagattttgaaggaaggaaagccggcggttgaccgttatattgacttcctgaaagcgggaagttcacaatacccgattgatgtcttgaaaaaagcgggtgttgatatgacgtctccagagccaatcgaagccgcgtgcaaaatgtttgaagaaaaacttgatgaaatggaagagctgctgatgaaagtcaagcagtcttaaaaagtaagcctgtgcggaaatgacgcacaggcttttttaaaaccctttaaaggttttccggtgattcaagcggtagagggtaaacaaaatagacagaaacagcagaggagaggtaatataaagcggcagcatatgcatcatgcctaagatattcagacagaaaaaaacggcaatgcacacaattgagatcaaagtagacatcatggcgatcctcctcgtcctttttccttataaggatatgagtgaatgcacttcgttatgttttgtgacaaaaatatgaacattaagcatagaggttgtcaaaagtcgacatcttttgttatcataaggatgtgaaattgatcacaaacaaacattacccctttgtttgaccgtgaaaaatttctcccatcccctttgttgtcgttaagacatatgaaaccgcgcttatcccggcgcggtttctttagtgctaaaaacagaacgtacgtttggttatggcgtaaaaaaacagcctcaagcatatgcacgcctgcggctatttttcacatgattgatattcatcagaataagtgctgagagacttccaaaacattccgtgtttggcttccactttggcaacctttttagcaaacgccagttttttcatttctttttctacctcttcaaggctcaggtcatatacaagagcaatttccttcgaggcaacgaagcggaaatattcaataaaacattctaaaggcggtgtttccgacggcttcggctcgtcgccaagcatctcaaataaaatttcttcatatacatcatatgagtagctgccaggaactttaagcccttcatcctcatgctgcgtattaaaaaacgtcagtgtcggattaacagaaacatccatctcagcagcaattttcatgtcacattgaagcgccttgaccgcgctttgagaatgcagatcttttttgaattcttcaagatcgagacttgtattttcagcaatctccaaaagcacgttttcatccgtaatatttttctttgaaacaaataggctctcctgcatatttctgagaaattgcatgccggcttttcgtccttgcaattcggctgctttaaaagcgagagcagccatataaggcgatgaaagcggctgatcctgttcgaaccagacattgccgtcacatgacatgccagagcggctcgcgatcttttcccatgcttctgcgagaagatgcttttttcgctttttatttaaagcggtaaggcttgcggaagcgataatgcgtaaggtgaaaaaacgtccgtatctgattttcagctttttgatgacgggctctaaggaccagcattcaggacataaagggtctacaaacatataaatttcaagcggtttttttggatgaccgtggcaatgggcgaagtatagctcatgctgatagtttgtcaagatgatcgatcctccgcttccgtttgattcaccatatgccttgctgtcaactccagccggccaaacaaaaactcacgaatttcgccctccagccctacatggtacattgcgtccttcatacagctgagccacgcatcagctctctcgtttgtaattggaaagggaagatgccttgctctgagcataggatggccgtgctcctcagtataaagcggaggcccgcctaaatactgagttaagaattgcttctgtttcctggcggtttctgtcaaatcgcttggaaaaatcggcttcagcaaaggatgagacgcgacacgctcataaaaagtatcaacaagttgcgatagaagttcctctccaatcgcttcataaggtgcgttaaacgattgtcccatgttgactactcctttaaatatggctaataggaatcataaatcctattgcaaaaagtaattttctgtatttcattgtttcatctagatttattttagcaacaaggcatcatttctacaaacaaactgccttttatgcgtttgatgacttatttcggctgacagccggggtttgtatttcatatcatatcacataaaaatcaggaatgcgtaagatttcacttcgcaaaaaaaccagagggaaagagcacctctggttacgcgtaataagctgaagttattttttttacatagttttgcgtttcttggaaaggaggaatgcctccgtatcggtcaacattccccggtccggcgttgtaagccgctaatgccatagacacattgccgtcgtatttatccagcatttgttttaaatatttcgttccgccctccacattttgctgcggatcaagcggattggaaacgccaagtgagcttgctgttgacggcatcagctgcatgaggcccatcgcacctactccgctgaccgcttttgcattaaagcctgattcctgtttgatgacggcgcggatcagtttttcatcaacgccatatttatcagcggcttttttaatcgcactgtcaatagaaaagtctcccgaactgatctgatttgctccatgtttgtttgaagctgaatctgcagcagctgtttcagtgctttctgccgcttttgtgattgaacctgaattgctgctcgtatatgagttaagcccatacgctgaaagcagtgacggcgctgttgtattcccgctgttcagcatgttgagcgggcttggcgatgaagaaggtgctgattgctgagatgccagaccgtttgtatattggctgagcaaagagctaaaacttgaaagcgggctttccgtattctgagtgtccgagctgctgcgtgcattagatatggactgtagtgcctgaagctgaagtaaagctgcccaattcgttacattcacgatgtcattccaccttatatagactttcgtttttcttcataaaaacgcagaattttatttttggtttcgcgctgaggaatgctgaattgctgaagcagcttctcgaaagcttttctgccctcatgccaatccgccgcctcaaattcaatttcatagtcctctttatttaaatatcggctgtggtctaaaactattaagcctttttctgtttctttttccgcacggtttgttgctaaagatccaaagtattgaatggcatccgtatcgatctgaagcttgtgcagctggtccttcacagggccctcgggaactgaaaatccagcgagatctgatacctctgaaagctgctggtgcgtttccagaagccccacatcagccggctcctttaatgtaaggacatactttccgttttttctgcggatacgaagcgcagcttgtttttgtttcagcgcgaagctgtctgtatcaaaataatgattcttttgatctgtaaaatctttttctgtcagctggagtgccgctgctatgtttttgaattcttgtttggtcagcatgtttttaaattcgatttcaatttcttggctcatgatgctcttcctttcctccctgtaaatcttatttttactattatctctttagatgttaggtttatcaatatcgagctcgatatgataaaatgaatctgtactttgtttaaaaaaggagagcattatgcaaaacagaatcgaaattttgaatgcaacattatcggatgatcagcttcgccttgcctgtcagacagaaggaaacgaagcggaacgcaagccgtcaggtcaaatgcttgttgattctgaccactttgcttttgtatacatacttgaattagctgattcttttgaatatgtcattataaaggaacatgtatggccggaactgaagcaggcccatgcacaaaaaataccggttgttttagaggcaggagaccaaacaattgaactggcaggcctgcatgaggagctggaatatcttttagaaaatataaaagataatgcaaactatggagaagaaatggaagaaaaagtgaaacgcgtgtttttatagaaactggttcggaattgggggatgtatgatggatgacaaacaatgggagcgttttttagtgccgtaccgccaggctgtcgaagagttgaaagtgaagctcaaggggatccgcacactatatgaatacgaggacgaccattcaccgatcgaatttgtgaccggacgcgtcaagcctgtggcgagcatacttgaaaaagcgagacggaaaagcataccgctgcatgaaattgaaaccatgcaggacattgctggccttagaatcatgtgccaatttgtcgatgacatccaaatcgtaaaagagatgctttttgccagaaaagatttcaccgttgtggatcagagggattatattgcggaacataaagagagcggataccgatcataccatcttgttgtgctgtaccctttgcagacggtatccggagaaaagcatgttctcgtagaaatacagatccgtacactggcgatgaatttttgggcgaccattgagcattcattgaattataaatacagcggaaacattcctgaaaaagtaaaactaaggcttcagcgcgcttctgaagcggcttcccggcttgatgaagagatgtcggagatcaggggtgaagtacaggaagctcaagctgccttttcaagaaagaaaaaaggaagcgagcaacaataggtaaaggggaagaagagcatgaaatttgccgtatcatcaaaaggagatcaagtttctgatacgctgaaaagcaaaatacaggcgtatttattggattttgatatggaactggatgaaaatgaaccggaaatcgttatttcagtcggaggcgacggaacgcttttgtatgcttttcacagatacagcgaccgcttggacaaaacagcatttgtcggcgttcacacaggtcatctgggtttttatgccgactgggttcctcatgaaattgaaaaacttgttcttgccatcgcgaaaacgccgtatcatacagtcgaatatccgcttctcgaagtcattgtgacctatcacgaaaacgagcgggaagaaagatacttagctttgaatgaatgtacgattaaaagcatcgaaggaagccttgttgctgatgtggaaatcaaagggcagctctttgaaaccttccgaggcgacggcctctgcctgtcaactccatcaggcagcacagcctacaataaggcgctgggcggagcgattatccatccgtctatcagggcgatccagcttgcggaaatggcttctattaataaccgcgtgttccgtacggtcgggtcacctctgcttctcccatcccatcatgattgcatgattaagccgagaaacgaagttgactttcaagtgacgattgaccatttaacccttctccataaggatgtaaagtcgatccgctgccaagttgcatccgaaaaagtgcggtttgcgagattccgtccgtttccattttggaaaagagtccaggattcgtttattggaaaaggtgaatagaaagaggacatatcgtggagcatttttttatcagaaagaacattacttccgctgaggacgggatgactgtaaaagaatatgccagtgaactgggaatttcgaaacgtctgctgaccgatattaagtttggcgggggagacctgcagattaacggtgagcatgtgacggtcaaatacgttttgaaagatggagatcttcttatcgtgaagtttcctgaggagcaggtgagcgagacgctgttggcagagcctgttccgctcgatatcctttatgaggatgaacatgtgcttgtgataaacaagcagccgtatgtgtcatcaatcccttcgagagagcacccctccggcagcattgccaatggaattattgatcattatcaaacaaccggagtgagggcgacagttcatcttgtcacccggttagaccgggatacatcaggtgtcatgcttgttgccaagcatcgatttgcccactccattttatcgtctgcgcaaaaaaacggccttgtgaaacgccggtatgcggcagtggttcacgggcggatggcacagatggagggaacagtcgatgctccgattggcagacatcctgacagtattattgaacggacggtaacgccagacggccagaaggctgttactcatttttacgtcacatgtgcaaatgacgacatgacctcggtggcattgcagcttgagactggacgaacccatcaaattcgtgttcatatgagttatctcgggcacccgttgtgcggcgatacactgtacggcggaacgagacaggaaattgaccggcaggctctgcacagcgagcatctttcgtttatccatccgctgacacaggagaacatgacgtttcatgctccactgcctcaggatatgagaaaactgataaaaggagagaatcattgattctctccttttttatatggggcgaaatcttgattcgtcgtaaggcagggagcttggaacagagacggtttctatttctggaaagcgaaagcctgtcagttgatttccgaacacgcagcctgtatcaatgttgatggtgcgattgaccttccgaggctctttcacaggtgtatgaccgtataccacccaagcctttccgttataggctgccgcccaatcacgtctgacgggtctgccgtccggatatgtttcacccgtcacgtcaccgtaaagcacaaagtccttcactctgcgggtatatttgccgatatcgtcagctcttatgccagcatgggcgacaactaattctccattatgtaagatgtcgtaaagcggcgctgtttcgtacagcttcataaactgttcgctgactgattttttctcatctttggaaagttcctcaagctctgccgctgttgtttcgagaccatgcatcacttttaccggatttccttttaagtaacgatataatttattgcaatggtttcccgggacataacgcacagcgcctttttcgtaagcgccggctacaaatcggatgacctctatcgatttgggccctctgtcagttaaatctccggcaaaaacaagcaccctgccttcttcatggacaggtactccatttttgattgtatagccaagcttttggattaatgcagtcatttcgtcatagcagccatgaatatcgctgatgatatcgtaagccatgcggtctcctccttaccgattgttttatttattatgaagcaaagtgttgtgagtcatcacaagcttttatgtgcaaattatagaagaagaatcattttctaaacaggattaagaccttatcactttatttttcatcatcacccttgttaaaatcgcgttatgttttttaaaaatgaggttttgttctctgagtgagaactagcataaccctgacttaaaaaggaggttctgattatggcgcatacatctgtcgcatctttagttgttgtacttatcgttgcatttttgacacccatccttttgcatcggtttaaactcagcatcccggttgttgttgctgaaatcattatggggctgataattgggaaaagcggccttaatttagttgtggagggtgacacctggctccagacactctctatgctcggatttatctttttaatgtttttaagcgggcttgaaattgatttttcgtcgtttgagaaaggaaagaaaaagcagttcctgccgaatggcaaggaagcgccgaatacgtttgctgcggcatctgttattttcgtcggtatttttattttatcattgctcttgtcctatgggttcgtcttggccggatttatccaaaatgcatttttgatgaccctgattatttcaacgatttcattaggcgttgtcgttccaacattaaaagaagaacggatcatgaattcgaatatcgggcagattattttgcttgttgctgttattgctgatttggccacgatgattcttcttgctgttttttcttctttatacggagaggacagcggaaacatgtggctcctgatgattctgtttgcggccggagtggtgctttactttttcggccgggtcttcaaacatcgctcttttgttcaatccatgtcaaaagggacgatccagatcgggacgcgtgccatttttacgttaatcattgtactcgttgccctgtctgaatcacttggggcggaaaatattctcggcgctttcttagcgggggttcttgtttccctgctttcgccaaacaaagaacttgttcagcagctggattcattcggttatgggttcttaataccgattttcttcgtgatggtcggtgtgaagcttgatatttggactcttttccaggataaaacaattttaatcatgattccgctcctgctgctggcgctgttagtcagcaaaatcattcctgtcatgtacttaaagaagtggtatgataaccgaaccattttcgcgtctggtttcctgctgacatcaacgctttcgctcgtgattgccgctgcaacaatcggccagcagcttcacgtgatcagtgcaaatatgtcaggagcgctaattttagtagccgtcattgcaagtatttttacgccgatctgttttaaaaaattatacaaacgggaagagcagccggaggagaaaaagacgattacgttcattggcgccaatcaaatgactttgcctgtcacactcgaattgccagaggaagagtatgacgtgcgtgttgtacacgtctaccaagagaatgcggaggaaaagctgtcagaatcagtgtttgctgttgaaacaatttctgactatgaacacgagacgcttgaatcactcggcatttttgaaacggatatcctcgttgtggcgacaggaaatgaagatatgaatgcagacattgcattacttgcaaaagaaaaaggcacagaaagagtcattgcaagcgtaggatcaccggagcatgaagcagctctgaaggagcagggaatcagcatcttttctattctgctgtcgacaaaaacgctgcttcgcgcactgattgaagcgcctggcgtcatgaagctgctcacgaaccaagagtcttcgctgtatcaaattaatatggagaacagtaaatatgatggtgtcattttacgggaattccctttaacaggtgacgtcatctttgtcaggatcttcagaggtgtggacagcatcgttcctcatggggatacaaggctgaaacttggagaccgtttaattgtcaccggatctcgggggtacgtaacggatcttaagaaaacattggaaggataaatcttgaccaaataaggattcgtgttaatatagaggtgcagaacaattcaatatgtattcgtttaaccactaggggtgtccttcataagggctgagataaaagtgtgacttttagaccctcataacttgaacaggttcagacctgcgtagggaagtggagcggtatttgtgttattttactatgccaattccaaaccacttttccttgcgggaaagtggtttttttattttcagagggggaatgatttgtgaagttttcagaagaatgccgcagtgcagccgcagaatggtgggaggggagctttgtccatccgttcgttcaaggaatcggtgacggaactcttccgattgaccgttttaaatactacgtacttcaggattcctattatttaacgcattttgcaaaggtgcagtcatttggcgccgcttatgcgaaggatctttatacaacggggcggatggcaagtcatgcccaaggtacatatgaggcggaaatggcgcttcatcgcgagtttgccgagctgttggaaatcagcgaggaagagcgtaaggcgtttaagccgtctcctacggcgtactcttatacatcccatatgtaccgttcggttttgagcgggaatttcgcagaaatcttagcggccttgctgccatgctattggctctattacgaggttggtgagaaattgctgcattgtgatccggggcatccaatttatcagaagtggattggcacatatggcggtgattggtttagacaacaggtcgaggagcaaatcaaccgctttgatgagctggcggaaaacagcacggaggaagtgcgtgccaagatgaaagagaattttgtcatctccagctactatgaatatcaattttggggaatggcctatcgaaaagaaggctggtctgacagcggcataaaagaggtggaggaatgtggagcttcacgccataacggatgacagcaagccggtagaagagctagcgagaatcatcattacgattcagaatgaagttgattttattcatattcgggaacgttcaaaatcggcggcagatattttgaaactgctcgagcttatttttgaaggcggtatagataaacgaaaactggtgatgaacgggcgcgtggatattgcgcttttctctactattcaccgcgtgcagctgccaagcggcagcttttcaccgaagcaggtcagggccagatttccacaccttcatatcgggaggtcggtgcattcactggaggaagcggttcaagcagaaaaggaagacgcggactacgtgctgttcggccatgtgtttgaaacggattgcaaaaagggtcttgaaggcagaggagtatctttgctgtcagatatcaaacagcggatttccatcccggttatagccatcggggggatgacgccggacaggttaagcgacgtaaaacaagcaggggcagacggcatcgctgttatgtcaggaattttctcttccgctgagcccttggaagcagccagacgatattcccgcaagctaaaggagatgcgctatgaaaaggcattatgaagcagtggtgattggaggcggaattatcggttccgcgattgcttattatttggcaaaggaaaacaaaagcaccgcattgtttgaaagcggaacaatgggcggcagaacgacaagtgccgctgccggaatgctgggcgcccatgccgaatgcgaggaacgtgacgcgttttttgatttcgccatgcacagccagcgtctgtacaaaggtcttggagaagagctttatgcattatccggtgtggatatcaggcagcataacggcggtatgtttaagcttgcattttctgaagaagatgtgctgcagctgagacagatggacgatttggactctgtcagctggtattcaaaagaagaggtgttagaaaaagagccgtatgcgtctggtgacatctttggtgcatcttttattcaggatgatgtgcatgtggagccttattttgtttgcaaggcatatgtgaaagcagcaaaaatgcttggggcggagatttttgagcatacgcccgtcctgcatgtcgaacgtgacggtgaagccctgttcatcaagacccctagcgaagacgtatgggctaatcatgttgtcgttgccagcggggtgtggagcgggatgttttttaaacagctcggactgaacaatgcttttctccctgtaaaaggggagtgcctgtccgtttggaatgatgatatcccgctgacaaaaacgctttaccatgatcactgctatatcgtaccgagaaaaagcggcaaactggttgtcggcgcgacaatgaagccgggggactggagtgaaacaccggatcttggcggattggaatcggttatgaaaaaagcaaaaacgatgctgccggctatacagaatatgaaggtggatcgtttttgggcgggactccggccgggaacaaaggatggaaaaccgtacatcggcagacatcctgaggacagccgtattttatttgcggcgggccatttcagaaacgggatcctgcttgctcccgcaacgggcgctttgatcagtgatctcatcatgaataaagaggtcaaccaagactggctgcacgcattccgaattgatcgcaaggaggcggttcagatatgatgctacagctgaacggtaaagacgtgaagtgggaaaaagacacaggtacaattcaagacctgctggcgtcttatcagcttgaaaataaaattgttatcgtggaaagaaataaagaaataatcgggaaagaacgctatcacgaggttgagctttgtgatcgtgatgtcattgaaattgtccattttgtaggaggcggatgagcatgttaacaattggcggaaaatcatttcaatcaagattgctgctgggcacggggaaatacccatcgtttgacattcaaaaggaagcagtagctgtttccgagtctgatattttaacctttgctgtgcggagaatgaacatctttgaagcatctcagccgaattttctggaacagcttgatttatccaaatatacgcttttgccgaatacagcgggcgccagcagtgctgaagaagcggttcggattgcaaggctggcaaaagcgtcaggcctttgtgacatgattaaagttgaagtcatcggatgcagccgttccttgctgcctgaccctgttgagacattaaaagcgtctgaacagcttcttgaagaaggctttattgtgctcccgtacacgtcggatgacgttgtgctggcgagaaagctggaagagctcggcgttcatgccatcatgccgggtgcatctccgattggatcgggacaaggaatcttaaatcctttgaatctgtcatttattattgaacaggcgaaagtgccggtcatcgtggatgcgggaatcggctcgcctaaagatgcggcatacgcaatggagcttggagcggatggcgtactgctcaatacggctgtatcgggcgctgacgatcctgtgaaaatggctcgtgccatgaagctcgcggtggaagcaggacgcctttcttatgaggcgggccgaatcccgcttaagcaatacggaacggcaagcagtccgggagaaggtcttcctgtatgacaggcaggtattcaaggcaggagctgtttgctccgatcggcccatccggccagaaaaaattgaaagaagcgcgcgccgtgattatcggcgccggcgcgctcggaacagccagtgcagaaatgctggtgagagcgggagtcggctctgtgaaaattgccgacagagattatgttgaatggagcaacctccagcgccagcagctttatacagaagatgatgtcaaaaaagaaatgccgaaagcagccgctgcggagcgccgtctccgttcgattaacagcgatgttgatgtgaccggccttgtcatggatgtgacagcagaaaatatcttcgagctgattagggatgcatcaattatagtggatgcggctgataattttgaaacccgcctgatcgtaaatgatgctgcggtaaaggaagggattccttttctttacggtgcctgtgtagggagctacggcctcacctttaccgtggtgccgggttctactccttgcctgcattgcttactcgatgcacttccgattggcggagcaacatgtgacacagccggcatcatcagtccggctgttttgcaggtagcagtctttcaggtaacagatgcactgaagctgctgacgggagaggagtgcgagccggtgctgcgctcctttgatttgtggaaaaatgagcggtcagaagtgagagcggccagtctcaaacatgacgcatgcccaagctgcggcacaaaggattttccgtttttgtcatatgaaaatcaaacaaaagcggctgtattgtgcggcaggaacacggtgcagatcagatcatctattacgaaagaagcggatcttgaagcgcttgccggtcagctgaggcaggccgggcttgaagtagctgcgaacccgtatttaatttcctgccgctcggatgatatgaaaatggtgctgttccgggacggcagagctttgatccatggaacaaatgatattgcccgggcaaaatccatttatcataaatggatcgggtaataaaaggagtgtagtgtaatgagtatatataaagcattgacaatcgccggatcagattcaggcggcggcgcagggatacaggctgatattaaaacctttcaagagcttgaggtattcggaatgtctgcgattacagcggtaaccgctcaaaatacgcttggcgttcatggggtgcatccgctgactgtagaggcgttgagacagcaaattgacgctgttgctgaggatttgagaccggatgcagtcaaaacgggaatgctctggaatgccgacatgattgaagaagtggcaagaaaaattgacgagtacggattcaatcgtgtaattgttgatccggttatgatcgcaaagggcggggcatccttgctgcgtgatgagtcagttgccaccttaaaggagttgctcattccaagaagctacgcgattacgccgaatgtcccggaagcagaaacgctgacaggaatgacaatcagctcgctggatgaccggaaaaaagcagcggagcagctcgtcaagatgggtgcgcagcatgtcattatcaaaggcgggcaccagcctgaggacaatcacattactgaccttctttttgatggcagcatgtttatgcaaatcacccatccttatatcaatacgaagcatacgcatggcacaggctgcacctttgctgcagctttaacggcccaaacggctaaaggagacagcatccatcaggcatttgaagttgcggccaactttgtccgtgaagcggtggaaaatacgctcggcatcggatcgggacacgggccgacaaaccatttcgcttttaaacgaaacagcttaaatacaagccgatgagatcaccagctgatggtgatctcttttgcgtttgctacggtatgcgcttttcatctggacaaggttatgatatgataggaattaagatcaggtactaatactatgtctttattaaatataggaggctttatacatatgaatttttcacttgaaggccgcaacattgttgtgatgggggtagccaataaacgcagcatcgcctggggcattgcgcgttctttacatgaagcgggtgcacgtttgattttcacatacgctggtgaacgcctggagaaatccgttcacgagcttgctggaacattagaccgcaacgattccatcatcctcccttgcgatgttacaaacgacgcagaaatcgaaacttgcttcgcaagcattaaggagcaggtcggtgtaatccacggtatcgcgcattgtatcgcgtttgccaacaaggaagagcttgtcggcgaatacttaaacacaaatcgtgacggcttccttttggctcataacatcagctcatattctctgactgctgttgtcaaagcggcacgtccgatgatgactgaaggcggaagcattgtcactttgacgtaccttggcggagagcttgtgatgccaaactacaacgttatgggtgtagcaaaagcttctcttgatgcaagtgtgaaatatttagctgctgacttaggaaaagaaaatatccgcgtcaacagcatttctgccggcccgatcagaacattatctgctaaaggcatcagcgatttcaactctatcttaaaagacatcgaagagcgtgcaccgcttcgccgcacgacaacacctgaagaagtgggcgatacagctgcgttcttgttcagcgatatgtcccgcgggattacaggtgaaaatcttcacgttgattcaggtttccatatcactgcccgctaagcaggatctatttcaagcaatcccgaatagggattgcttttttatttcttctgattttcagctttctgtcatatagatagaatatgacacaatcggagggatgaagatgtctaataagaaaagaaacgcggataaaaaaccgctcatgtatattgttcagccggattatgcagaaactacaagatcatccatgcaggagattgtcatcaaaagaaaggccgacaaacccgctccgccaaaagctgaggaaaagccggtttaccatgagaagcagcaggaggaagctgtggcacaggatgtcctgcaagaagaccaaaagcctgcagccgaaccagtgagtcagcaaactcaagaggtgagagaaccagagaacataaaaagccaagaggaacagaaagcagagccgcaggccgtagaagaaaccgttgaacacgagcccccgaaagcagaaaaaaaggaagagcctgcacttgaggcccggaagcctgagaaagaaccggaagctgtccatagtgctgataaagcggaggaaaaagcaccgccggcacgaaaagtgaaaaaaccgatgagcaagatgacgatccacgaaaaaattgattttttaacaaagctgcctcataacatgccgagagcgctttgtttgattgaagccaatggaagaacgtacaggggcgtgattgtcggaagaagaaatgattccgtcctgcttcgaacaaccggaaacggagccccaaccgaactggcaatcgatgatattacctctttgcacccgctcggtttttaacgaaaaagaaaaaagctgcccggctgatgttgccggacagcttttttacatagagaaaagcctgcggcttgcaagcttttccagcttatgattaatgctgatgatgtgtacgattgattaatcgaggatttaagcagttgattgcgcagaagcagtctaagtcaacttcaatacagtagttcgttttttcgagtcggaacacttcacacaccgtatctttatcggtgaagtccaaaatgtgtttgtgttcgtcaaatgcgattaataatgacagtgttgcgcagcttccatgcactctttcgaccctgaaaaatactgtattaaagcaagggccgttatcgagttcgccgacatttccgaaggcgactaatggcgttgattttgatgtaaatattgcaaaaggcactgtgtcgcctaacgaatggcttacagataaaagcttagagtggcagccggtcgggcagtcttcttcaacagcgttttgcagatcttcaatattttctacagcttcacgcacgcagcttgatgttttctggctcatattatccctcctgccttataaatttgagactggcgaaatgatggagagtcagctgcctcacgcaggaagcagctgaatgatttgcacctgtaatagagtttggaaggggattcctctttacaagtgtttatccattgtgatgatgctttttatctttatgaggcgatgttctgtcaactagctctggtgacaggcactgaatcgcgcagaagcatccgagatccacttcaatgcagaaatctgttttttctagcccgaagaaatccgggtcgcaaggatggcaaacacttaaggtatcgcctttaacatcgacagggcgtaaaatagacagtgttgcgcagcaatcacataatttttcaacgcggaagaaaatggattcaaagcattgcatatcatccacaaatccccccacgtttccgaatgtggagaacaatccgccttttttatcaaacaagagaaacggaattgtgtctttacctgcaattgtcggattcaaaaggtttgtatagcagccagtcggacactgttcctcaactgcctcctgctctgctaaaatcttttccactgcatcgcatacacagttctcatgccggccatgggtttttccgcagctcattgatttcagctccttctttatagggtatttgactttagtccttaacaacatatgtacccgtgccccacttggtgtgggtgaacgtctatatattcatcatatgcttggaaaataagaaaaagcagagcgtttttagctctgcttttaggttctagaggacaagagtgatgactaggacagcgatcagaacgtttgtagctgtagagacaagggttgcgatatcggcatctactgttgtgacgtttacgccgcgggagcattcgataagaagtttctggcggtttacttgcttgttagctgtaagctgcaataaatcttgtgcgactaattcagcaataacgccatctgcaatggaggtgagagctactgtcaagacagctgcattaagcgctgttacaatagatgttacggcttgaacgtctgtagatgaaacgttgatgtcacaagagtctctaataataatcgtctcatctgagacttgtttgttgagatttgcctgagctagatcttggtcgataaaggcgttgttgtcattgccaaacccattgttattgcagcaaatatcgcaattgcattttctttcttctttttctttctctttgtgctctaacggatggtcacagtcaggatcaagtgcaacccaagagtatggtctgctttccatatctattcctccttttcttttactgttattaaatgagcgagcctcttactttgactgaggcatttatcttgatgatgtgccctattttttatgattaatttgaattgttattgttttgccgtctttgtctgagctgttcaatgagctgctctctgcggctaagcggtttatcgctcttttgctcttgtacggcttcttcttcttttttcttcttgtgtttttcagctagctccgctgatttcgcttgcaggtcttttaccatattcaaaagcatttctttttcttcatctgatacttttttcattttgtcttttgtgatgccgtgttttacaaatatgttttggaccagcattttcatcattggatcaacttctgggagcttttcaagctcttctttgattttatcgttatctgacatttgttctcacctcaacttttagtttgtgaaaagaaagggttaaaggatgtcgaattcaagtagcatactgtttaacacctgaagcaagatttgtacaaaggttattatttcgtctgcagacaaagtaatcttgatgtttcggctgttgataattttaatgatggttctttttttgatttgagagttatcgagaatgagtatttcgcttgctactgtgtcggccaagtcctcgtcggcaataacgagctgtgtcagcaggataatcaatgttgtaaccaaggcttgtatagaaagggcagatgttatatgtgacgtatctattgtgatattttcgcaatcaatcacttcgatctgctgctcgaattcgcttgataattgctcaaatatgtcaggatgcagggattcaatttttgtttcaaatgacataaccttcactcctttcttatccatactctatataatgcaaatggggtgcagagcggaataataaaaataaccaattttctgccggacaagatacaattcatgaagaatagggttttcgcatatatgtgaagggatcatgattggcaaaggagtgaacgagtggttataaatgggctgacaattgttcttctatcgcttgcggtctttcggctcgcccgcctgctggtgtttgacacgattatggcgccgcttcgcagtctgtttcatgaagagaaggaagaaaaggatgcggacgggaatattcaaacctatatcgtgattaaaggaaccggtgtcagggcgtttattggtgaattgctgagctgctattggtgcacaggcgtgtggtgcgccggctttttgattttatgccaggcgttgatcccgcaagcggcgcagtggctgattttacttttggcgatcgccggccttgccggcatcatagaaacgctcgtatcaaaatggctgcaagaatgaggcgttaccaccagcaacttttcactagcatcagcataaagtagcatatatgacataaggaaaggaagggaacaaaatgaatcaattcaataaaccttcccaaaaatctccatatacagattcgtcgtatcaatcaaaaaagataaaaaagaaaggctgcgggtgcggaaataaaaagaaaaagcctcaatagcctggcaaagaaaccggagaactccggttttttgttttttaacggagcggcctcgctcagcatatatcataagcggggggataaaagtgaatgagtttgaaaaatggatagaaggaagatatgaaccacacgaacaaaagcaaaaagagtatgaagacacgatgggccgtatcagaaaagacttggatgcatttgataaagccggtctggaatttgaagatgagattgaagagctggctgaaaaaacggaggccttacttaaaaaacatcaagctcaatatgatcaatcgtaaatccgcaaacgccctatgcgaatatccaagccgatccaatcagctcacatagtgtatagagagtaaaggaggtgcttatctatgggctttggatacggattcggcggcggctacggcggcggctgttatggcggttatgctggcggttacggcggcggctatggttcaacatttgttttgttggtcgtattattcattctcctcatcatcgtaggtgcatctttcttttaagatgtattgaggaagtacgggttataacccgtgcttccttgccttgtgtttatttttaaaaatgttggaaaagcacattgtattatgtgcattcatacaataccgtattactccgccaaaaggaggcgcattatggataatcaattttttaagaacatcgaaaagaaaacaggtgtgaagatgcaggatgtaatgaatcttgccggatcactccaaaacgctaattttaaagatgaaaatacagtgcgcagtgtgattaaccgcgtagctcagatggcaaacagacgcgtgccaaaagaattagaagataaaattgtggaatctattacaagcggaaaagaaaagcttgattttggcacgatttctaaaatgatggataataaataagtggatggcctggctgactcactgcagcgggcctttttttacagtaaaaacccggcagtaatctgccggactgttaatgatgcaagggctgtcttgctttttgtagaaggggatacaaaaatcttgagcggttggctgttttgccgcgcctgttagcggggcaagacaaatataaatgctgtttcgcccgggtcatggctacatataaaagacgtctttcctcctcaagagcggcctcgtctccttttcttgccgtttctaatgagaaatcgtgcggaatcgagccgtctacagtgcctaacacgtagactgttttgaattcaaggccttttgaccggtgaatggtcatcagctgaacgccatgttcatccgttctgtttttctcagcggccctcatatggtctacgtgggcaagaaagtcaggaatcgttttgaacttcttggcgacaaccttgatgtcgcgcaggtcatcggaacctttttccagcttgttgccctcattgccccgcttttttaaatactcggagaagcccatttttccttctgcaaaggtgatggcttctacgggcttcatcgtgcggaggcttgcaaaaaacggtacgattttcttgattttgtccagctggaatggcttcagatcaggcaatttggccagcgctttgatcatggtacagtcctctgtaatcgagagcgccttcagcgtattcaaagcggactgttttaaaaacaaggcgggaagcaagtgtttaatcgcctcggtgtcatcctcattttggctggcatacaagtaggcgagaatctggcggacgatccgtctgctgtaaaacgattggacgccgcggtcagctgtatacggaattgatgattgatgaagcctttcataaatagcacggcctccgctgtttgtgcggtacagaaccgcaaagtcttctggactggctccattttgaattttttctttgatatcggaaacgaccattgtggcttcttcctcttcatcataaggataaaacagcacagggacctgaatgtcatcgcgggccgcttcaagcgttttggcatatctgtttttgttctttttcacaacgatatcagcactagagacgatcgggtgcgtagacctgtagttcgcagttaaatagatcgtcttcgctcccggataatccttttgaaaatcaagaatgaaagacggattgcttccgcgaaacgcgtagatggactggtcatcgtctccgacacagcacaggttttgctccggactggcgagcatttgcatgattttgtattgaaccggattaatgtcctgaaactcatcaattaagatatacgtaaaccgagattgatattgttccagaaggtcaggccgctcgataaacaattcatagcaggctgaagccatgtcatcaaaatcaaattggctgtgttcttttttctggcgttcataatgttcatataaacgataaacttgtttttcccactcatcttttagagggatgcgttcatttgggacataagtgtttttccaaaaaccgatctgctgcagagcttggtcaactgggaattctttctcatcgatgccttcttcatagagtgcttttttgatatattgttcccgctgccactccattttcagcagatgctcaccgttccatttagcagaattagagtgatacaagatcttataaaacagactgtggaatgttcctgtcacaagtcttctgacttttgccggctgtaatccgtactggttggccatacgctctttcatttcagcgacagcttttgttgtaaaggtgacaagcagcatattttcaggcggtatgcctaagtgttcgatcatgtgggcggcacgggctgtcagcacccgtgtttttccgctccccgcacctgcaagcacgagcagcgggccctctgtttccgtgacagctttcagctgatccgtgtttaaaccgacagacggaaaaaggctcgtatcgggttctattgtttttggcacaaatggtgttcctggtttaatgcttctaggacggtgccattccgtaacagctggggacgggtcagcggcgatcgcttttcccttgggtaaacgaatgacaccagattcctgatcgtcttcttttttttcctctttagagggcttcggttcgcacgcctcctcacatgccggaaaatcgcctggctggcgatggataaactctggcggatcggcgatgttaagccgtaacaaaacgggctttccgcaatgagaacaaaataaatgtccttttattccctcttcaaagaggaattgataatgttctctcgaatatgtatgtaaatgtatgattctatcattcagtcgggcgcatttcaaaaaggggtcctcccaatcaaaaggtgttcattacagacaatgactatcatatcaaaagaaatgtgtttcaaaaagtaagtttaagggaaaagagacagcagaggggtgggtattgtatgatatatgcaggtcaaattcagaaccagcaatacgctcaatatgctaatagaacgattggacataagcaggattatgccggaaccgaaaaaatcagctatgtcccgtttcagcgggtatacaaagaactggaaaagcagcaggagaatcaaacggcagctgaaagaaaagtaaacgagatgaaacgtaagcgctctctttataagagattgcgagaaaaaggaatgggcacatatattaatcgatatgtataaaaaaccgttcataccagagaacggtttttttatatgcagtaaaaatccggatctcaaaagatccggatgcgttcagtccttcatcatttgtaagtgcggaatgccggcatcgaggaattctttttcagaaagcacgcgatacccgtgtttcttgtaaaacggcacagcctgtgtttgcgcgtttaaaatgaaaccggaagcgcctccgtctgccgcggctttttcgagcgctttcataatgatgccgccgacaccggctgagcggtggcttttcagtacgcaaatccgctctaacttgccgtagccgtccttcatgcgccatcttccggcaccgacaggcttttcaccgtcatacacgatgatatgctctgactcattttcaagttcgtcaatttcttcttcagcaggcacgttttgttctttgacaaagacttcttctcttacatagaatgcatctttcagttgttcttcattttttgcgataactgctttcaaacattattctcctctgcctagcaagaaggtttcatatactgtccacgatccgttttccagctggtaaagcaagtggaaacggtcaacgatttcttcatgcgacacttcctgcatttttaattgtcccagcacatctgaatgctcatcgtcggagagattttggccgaccgtcacatgcggaacgaaattatattcctgttctcctgccaacacaccggtgtatagcttttcattgagtgtttttaactcttccgtcggttctgctttgatgtaaatgacattattgacaggcgcaaatgagctgtattttgtcattttgagaacgagtgggtgggactcttttgcgatgtttcttaaatgtgatacgagctgatccgctttctcctccgcgcattcaaaggatgctctcagcgtcaaatgaggcgggattagagagtagcttgggtcatagcgctttctgtaagagtttgcaaggtcttggagcttttttgatggaaataaaacgattccgtatttcatattatgtccctcctggaaataaagtatgatagagtgttaaagcatttttttcagcgccggggtgatgagcggctgccagtatgtccatttgtggtctccgtcaaatggctcgaaatcataatcggaaagctttttctccagcagctgtttcagctcccggttcggttctgtaaagtccagaatgttcccgtctgtcgtgtggacgtcagtttcttttgttccgatttggtgataaatagagaggtgtttgatatcgtctgactgttttacggcttctagtacgtgtttgtcaacatagggagactgcatgatgatgttgccaaacatattcggataatcaagcgctgtcataagtgacacggttgctccgagcgaatcacctatcagcgttcggccgtaaccgatctgataggttggatactcatcatctgcaaaaggaacgagctcatgggcgatgaaccgtttataagccgaaaattttgaaccctccggatgataggtgtttctgcgctcttttacatccttataaggaacaccgataataatgctccggtctatttcgcgtttcgacagcaattcctcaacctgtctgccgattctccccagcctgaaataatcgtggccgtcctgcgcgataatgacatggtatttataaagcggggagtagttggacggcagataaacaagcaaggtcatttcctcgttaagctcttttgaaaagaatttcttttcttgcactgtgccgtttttcggtgccataaaaacattcctccaggacatcactatactttcttgcattttcaattattgtaccatgaattattagaaatttctctctttaaacggttcggcacacgaagaaaaaagtgttgaaataaactgtgaattgcgctaatataaaacaatcagaaaattgaaatcgatatttcttatcgtgagaggtggagggactggcccttagaaacctcagcaaccggcttgttttgcatgtgcaaagcgccaaggtgctaaatccagcaagcgttttttatgcttggaagataagaagaagcgttaaaccccttcttcttatgaagaaggggtttttattttgaaaagggaaggtgtcagctatatgtcacagcacgttgaaacgaaattagcccaaattgggaaccgtagcgatgaagtcacgggaacagtgagtgctcctatctatttatcaacagcataccgccacagagggatcggagaatctaccggatttgattatgtccgcacaaaaaatccgacacgccagcttgttgaggacgccatcgctaacttagaaaacggcgcgagagggcttgcctttagttcgggaatggctgctatccaaacgattatggcgctgtttaaaagcggagatgaactgatcgtttcatcggacctatatggcggcacgtaccgtttatttgaaaatgaatggaaaaaatacggattgacttttcattatgatgatttcagcgatgaggactgtttacgctctaagattacgccgaatacaaaagcggtgtttgtggaaacgccgacaaaccccctcatgcaggaggcggacattgaacatattgcccggatgacaaaggagcacggtcttctgctgatcgtagataatacattttatacaccggtcttgcagcggccgcttgagctgggagctgacattgtcattcacagcgcaaccaagtatttaggcgggcataacgatctgcttgctggacttgtcgtggtgaaggatgagcggctcggagaggaaatgtttcagcatcaaaatgcgatcggcgccgtcctgccgccatttgattcgtggcttctgatgagaggaatgaagacgctgagcctcagaatgcgtcagcatcaggcaaacgcgcaggagcttgcggcgtttttagaagagcaggaagaaatttcggatgtgctgtatcccggaaaaggcggcatgctgtccttccgtctgcaaaaagaagaatgggttaatccgtttttaaaagcactgaagaccatttgttttgcagaaagcctcggcggggtggaaagctttattacataccctgcgacccagacgcacatggatattcctgaagagatccgcatcgcaaacggggtgtgcaatcggttgctgcgcttttctgtcggtattgaacatgcggaagatttaaaagaggatctaaaacaggcattatgtcaggtcaaagagggagctgtttcatttgagtaaacacaattggacgctggaaacccagctcgtgcacaatccatttaaaacagacggcggaaccggggcggtcagtgtaccgattcagcacgcctcgacttttcaccaatcttcatttgaagagttcggggcatatgattacagccgctctggcacgccgacaagaacagctctcgaagaaacaattgccgcattggaaggcggaacaagaggatttgctttcagttcaggcatggctgctatctcaacagcatttttactgctgtcacagggtgatcacgttcttgtgacagaagatgtatacggcggaaccttccgtatggtgacagaggtgctgacccggtttggcattgagcatacgtttgtcgacatgacggatcgtaatgaagtggcgcggagcatcaagccgaacacaaaggtcatttatatggagacgccatcaaatccgacacttgggattacggatattaaagcagttgttcagcttgcaaaagaaaacggctgcctgacctttctggacaatacattcatgacaccggcactgcaacgtccgcttgatctcggcgtggatattgtacttcacagcgcgacaaaattcttaagcggacacagcgatgtactctcaggtttagctgctgtcaaggatgaagagcttgggaagcagctgtataagctgcaaaacgcgttcggcgccgtccttggcgtgcaagattgctggctcgtgctgcgcggcttaaaaacgttgcaggtccgtttagagaaagcgagccaaacagcgcagcggcttgcggaatttttccagaagcatccggcggtgaagcgcgtgtattatccgggactggctgatcatcccggcgctgaaacccataaaagccagtcaacgggagcgggcgccgtactatcttttgagcttgaaagcaaagaggccgttaagaagttagtcgagaatgtgtcacttccagtcttcgctgtcagccttggcgccgtggaatcgattttgtcctatccggcaacgatgtctcacgcggcaatgcctaaggaagagcgtgaaaaacgcggtatcactgatggcctgctccgtctgagtgtgggcgtcgaacatgcagacgatttagaacacgatttcgaacaagcgctgaaagaaattgctccagttgcggttcgttaaaaaagaagccggggatggcccggcttcttttattattgttcgtcatcaggattcagaatcgcgaggacttgatgatcctcccaaacgccattaatttttacattttttcgggcgatgccttctttatgaaatcccgctttttctaaaacacgcatggacccgagattacggggcatcacaccggcttcaatccgatgcagtttcaattcgtggaacgcataatcaacaaccaatctgactgcctctgtcataatgccctttccattatgggctttgtctaaaaaatacccgatgaacgcagtttgcagcgcgccacggatgatttgaaagagcgaaaccgtcccgattaatctatcgtctgacgctgtaaagatgccaaaatgatattcttcatctttctcaagtctttcctgatactcggttattcgttttctttgcccctcaaccgtatagtaatcgtctgcgcgtatcatagaaaactgttcgaaaaaatcccgattttcgctttgcagccgcaaattttcttcggcatccgttacttctaaaggtctaacataaatggtttttccttttaacatacagtgatctctccgttctcatgtcagcattcctcttacattattctcagggaaatgcaaatatcctttttataagaaggaagaaaaccaatttcccataaaagtgccaacatagttgccgattaagtagccgagcgtaccgacaagcatgatcggggcaacaagctcccgccatcccttggcaattgccatcgcagccgcagtcgtcggtcccccgacagtagcgttgacggcgagcagaatttcttcaagctgcacacggaacaattttccggcagctaaggaaaccgctaaattgctgatcgcaatgataaacacgaataatagaataagaggcgcattcgtgacgattaaacggagatctgcaggaatgccgatcaccacaaaaaacaaataaatcaaaaaggttccaagttcctgagatccattgagcctttcaaaaaaacgtgggaaaagaaaaatgataagaacagttaaagacgtaagcaccaggtactgatcaccaagcgtaccggtcagcaggggatgagaaaaaatgcttttaaaataaccagaaaccttcatacttaccgcaacaagtgcgaaagcagcaccggcattaaaagctatatcctttaaggaaatatccttccgtttccaatagctttcagcactgtttccgctgtttccatcggcttttaccttctcttcaaacggcatggcataatgccgctgaaaccatttgagtgcaggaatgctgattaaaataaaaaacaaaagcgccatcataaaattatcagccacaacggtagccgacacatattcaccaggcgtctcaaattttgccgccatcgccgcaaagttgaccccgccgccgatataagaggcgctgatcatcccgccgattttatcgagatagggaatatgctgtttaagtagaaaaaaagcaagaatgctcccaagcacagtgccagcggagctaatcagaaaaataaacagcaaacgcctgctttccttaaaaatttgccgaacattgatctgaaacaataaaagtggtatcgccagcggcaccacataagaccacacagtatcatacacaggcgactcaacaggaagcactcctacatttgtaaacaccatagcacctgccagcgcgataatagcacccgacacagcggacgcccacttaaagcgctgctccagcccgatgctcactgccgcccacaccgcaataaacccccacaatacccatacatcatcagaagaaatcaaagaatgcaaaatcccatcacccctattgttagaaaattaagacatattataatagccggggaacggaacagcaagtccaaaaaaagtttttctaaaaaagcagttgacgaatagaagggaaggttatataatagaacttgtcagaaagacaataacatacccagcaacacatacatatcatgattccgtagctcagctgggagagcgctaccttgacagggtagaggtcgctggttcgagcccagtcggaatcatagcttaaacccttgcgcagcaagggttttttattttgcttatttattgattttgtctcattcatcgaattggggacgaaattatttttttgagctgattttgacgaagaatctcaaaatcaactctgtttttgtgctaggtttctaggatcgaactggttaaagtgttttactgtgctattttcgagtttctcggtaacgtggccataaatatcactagttgttcgagcactggcatgtccagctcttctttggatagcaactgagactttcgccagcttccataaggagagccaccatagtatgccgcaagtcatgaagacgaacatcttttaggccgtacttcttttttaattttagtccattttgcggtaggggttgtatagtagtaaggttttcctttaccactgtgaaatacaaattgatgttctccgccttcccaggcatcgccaagcaacaatttttccacttgttgcctaaaaagacaatcaaacgcttaagtaattatatcttcaatatccaattatctattctatcgcctctttccatattaaaatcaactctaaaaactcatcagtttctataatactttcaaaaggctcatcaacccggtaatgatgttcagctattgtcttgtttttcttaattattatacttgtagcattcaacgtaatttcaaagtcttcataatctcctgttaaaaccttcttaacgtatccaatatactcgtctgcttcctcttttgttgaaatatcctcaaaaacgtccgagaaaatagttaatttttccggtagtattattcttgtgataccaaatggatctttttttaattgatatgtatatctcatcttgtttatcaccttctatgttatttattatacaaaggataagcagtggctattgtaccatccttgtttaagaacatttctattttaattcctgttgaattttcacctataaacttattagcacctatcttttttttattttgatacgcttcatcaatagcctttaacacatctacacgattccattcctttggaaaaaaactagatttggctatttttctcttcccgcttatttcaacattggcttcataaacaccatttttatcaggtgttttctcggaaccaggtataatttttccacccatcatactttcatgatgatatccaactgctttaccgcgtctattaatttcaccatggtaaatgtgtttcatcgttcccgtattatatttacccgtatccttattgttagaacgttcagatcttctgagaacactctcttttttattttcaatcatactttttaggagaggagtattttttgcgttatacgtattctcgatgtcttgtgcaatcccaaccagtgcaagatcattcttatttctaataatagaattgatgtaagatttgcctttgtttattcctttattgacatgagcagcggctgttccaccttcaaccactttacctactttagaaagcttggtagtggtttgcaccgcggcacccgcaccttttggaccaacgatatttccgatcacataactgatataatgacctttttcatatgcatcaccatttaccattttatcattccatgaatcggcgaggtttgtccagatgatttttgaataagaaggtacgctcaaaatggttgtaattgtttttgtcagtttcagttcgatagggagctgtgaatattcccatgcgcccacagctaagtctttgatgccatatatggtatcgtcaatcacatcgtcaataccatcatcaactccctcaacgaaatcaattactgtcttgctggcattgattatacttttaccgacggccttcagctgttttgcttgttcaagctgcactgcgtattggagctgttcaggggtaagattctcatagccgaccttcttggcaatgtctaagtattcatctggatccgtcactccgtcagctagcttctttttcagctctttgatttctcgttctttcgcttcatctttcttgatcttcaaataagcttcagtctgtttctcgatatcgccttttttcttatgtatgtcactttcacggtacgccttggcgttgtagtgaatgggcgtagcgtttttcccttttcctgtggattcctcaagcttttgaaagtccttcttgatgaattgctcgtttggctctgattgggcatattcagtaacaagtgcttcgtccacgctgcctagtttatcgactgtttttttgcgtttgtcctctgcatctgcaagttcgtctttaaagtcttctgtcgagaacaaatcaagtgggaggatgtcatcgatatcatgtaagatatctttcaacgctttcttttgttcagacattatggattttgattttgtgtaggcgttagccagttcgtgttctaagaaggattcttctatatatgcatcagacaagctggcgtcctctaaagtgcctgaaatgcttgttaagaaagcaattttcatatcaagtaagtcaatccaattgtcagctacacctgcgtggtcttgataaaatgctttaatgttgtcggcgcctttgccggaaaactcactgtcatctaaatcagctacagctttaaaggctttctttagattgaccatctgacttcttaattctttgtattcctttgcacgtttatctgcttctgaaagcagtgatttggcttcaaatactttcatgttcatatcctttcgtttgaatagctccaacaagattttaccatgggaaaatgaagaaatagacagcgatgtgattcaaaagtgtgaaatgaataatttgatctgtgtcaatttacctatttggattatttgtttggaaactgatgacgcagtaagacgattccagctgatgaatggtttaaatcctgatggcatttatggtcctaagactaaagctaaactcgaatctcttcttaaataaaaatagccctcctcaattggagggctatttttatttaatagaaacgtgatgtgtgtaccagtttccggttgcagtgaatcgtaattccatatggccgtggcggttacctccatactttacaaacgtgtaatcagaattggcgattgcatccttagccgttttatcaatgtttgcaattttcttggaagtgattttaccattccagccagcaaaacctgaagcggatgcacttggcgggctttcccactttgttattttctttccatactcgtatgaatagttgtcacttactcgaatatcatataattttatccctgtaaactttacagcgtaatagccacttgcagttttattttgggtggcctgtgtttttatcttttccattcccatatctgtacttacgcccatttccacagtgaaaccattaccgagatcaatttcttgatatggatgatctttgctgacatgcatactgtttaaagccttattcacttcttttacagttgggattttctcagatgaaagggttctcaagtttttttgttttgttatctcgtgaaaggtcgccttatcaataatcagatcagaattcttgtccactttttcaacagcatctgcactttgaagactaaacagagatgaaaaactcaaagctagggcaaaaaccacacccacaagtaactttttcattttatccctccttaatgttttcgtccccatcttatcttaatgtataatattggtaaatgagacgaaagtaacaaatgatgctattgattaaagtattaggctttgaaggaacgggaagatcgaaaagtaaatgaatggttttacccatttaaacaaccatatatcaggtgtatattggattgtaggggagggatatcatggtcaagatcatattggcatttgtttatctatttggcttcgttgtgttgagcaattgggctttcgacggaatattttcagagagctatttctcgccaatcggtttcctttggtctatcttatttacatttttcataggggtttataccggcttgcctttaatctacaaaaagtttactcaatcaagccgtttgactttgaaaagtaaaaagccaatttatttcactatcggtacagctgttattctctttgggctttattttctcaaaaacgaaatcgccccctatttgatgctatgtggctattttttaactctggcatcaggtatagccctgaccatcttattacagcccaaaaccaacaactgtaaaacagtataactaacaagaactaatgaaagcccgtctcaaggcgggctctatatcaaaagaaagggaatttttttgtgatatctatttacaatggtcaatagatattgtataattaaggtatagaaaggaggtgctgaagtggacgaggtaagaaactggattcttgctatcgctggtatcgtgaccatcattaaacacatctacgacatatggcagaaggaaagcgaaaagcatagcaagaaaaagaaaaagcgctcccgccgggtaagcaagaagcgctgatacacagtgagcaaaggggagtaaatccccttgctcataccattatatcacgtccacgataatatgaaaaaatattttaagcagtacaacacagcagattttgccgttttgcttatattggttgccgggatcgtcgcaattgatttgaccgatgagggtatgtctggaaagattgcgcatactgtattgatgatagccgttgttattaccttgttaaaaggattcattatgatgtggagagaaagccgacatgaaagaaagcgaaaaaattaagtttatccaggaagaagttttgactgcagcggaagcgggggagttgcttggaatcactcggcagcgattaagcacccttgtgacttcaggaaagctcaaaccggttaaaaaggttgggacagttgcattgtttttgcttggacatgtacaagcccttaaaaaagaattagaagcaggccggaagaagtaccggccgtatgatgagtgaatcccttctcaagatgagaatgattacttgtcctacttttgccacttaataatgagtggtaaattttatcaatttttgatatcctgtaattaatcataattgcgggggttcattatgaatgtatctgaattagttatttttccagatttattaaagttaccaaaaagcgatttggaggacatttgcaccaacgaaggtattgcggaatctggaggggcttttgaactagcgaaaagaatatgggattatgctgatacgtcagaaaaaaaaacaaagaatgtttacaccgtattgtcacaaattttttgctggtaatacgtcaatttcttggtacacttgtgatagccttgaagatttaagtaaatatattattgaaaaagaaaggcacaatccatttgaaacaaaaattccgtatgaagaggcaaagctaaatacgactccaaagttaagaagtgcatctagaataaacgagcattcatattttttaaggtttatatataaagatggtactcgtaggattataggtgaagatatagaggttttaccgacaaataaaacggctacagcttttatagatgaactaaacggaattatagaagttagagctaaaccaaatgatgctgaaaaaatagcagaggtaattgctgggtatgcaaggcagcaactgtctttacacaagcaaaactttattaaacctttcgggggtagtatagaaagtatagcggataccctaggtggtaaactttacgagtccaaagcaagtcctgagttatggatggacaactttggggaagaagaaaatgaagcattgcttgatatttttgaagctttaagtaaatactttgagaacggagatatagataaacttcaagaatgtttagataatgctaaagagattttgggtggggagctacttagtttaccttttgctgtacttgtacttgctggtatggggaatgtaggtttaaaagttgaacaaaaagatttaaggaacactactttatacaaagtatttaaaccctacttacaaacctcgggtggatatattaaatttgaagttgaggaaaatggtgttcagcacgagttttcaatggttgttggagttgaaagccagagcatctattttcgctctaaaaagactacagaaactgtaataaaaaaggtaagagaaaaacttttattgcaaaaattagttgtgtaaatatttgaaagagggtgatcttatgggtataaattggaaacaaaaatcagaaattgacgaagtgattaaagaaatcgcttgttcaagagtaattagattttatccaacatatattagtaagatcactttaattaatttagatactgtttttgaatatttattggagttggtagatgacggatctctaaatatattgtgggaaataagatgtcctgactttgattgtaactctgtaattttgcgaacacataatttatcagaaataatgggtaaagaaatagaatgtgattattgtgaaaatggtctattagtcagaagacaacatgtattccctgtttttgaaataaatgatgactttagagaatttttaaaacaaagtaaaaaaaaacaagtgaattatctacacgctctataagttcaccaattctccaagaaaaagcattaatttctttagaagacattaatttattactagaagaccgaactaaaaaagaattgaatgaaaaatctggagtgaatatatataattttttatacgttgagggtgattatgtggagaagaaacaatctttgggtagcgtaaaaattggcggaaatgtagggaattttgcaatccaaaatgaaaacacaacacaaactaatggtaataatgaagtaagcagagcatttgatgaaatttttgaacgaataaagggaatcgagaacgatgttcaaagggaacaggccatttttaatgctgaaatattaaggaatgcagttgaagagaacgatgtagataaaggaaaaagagtattagaatttttaagaaattcaattgggacaattggatcgttaacgaccattgctaagttctttggtattactatataaataaggcccaaaagggctttttttatattatccactttttctgttgcttcttcaattcacctttcatcaaaaggctttttacagctatacgaatatcctcttcactctttcctgttttccttttcaaatcgtccagagttggattctttccatacaaatgcatattcactatgatctgatatactttccgttcaaaatcagtcatttgatcatctcctagaaggatgataatcgaacgtatgttcccttgtaaataagttggatttggggacagatggggacgaattggggaccaacttgttcatttttagtcaaaacagaagattttttatcagaaatacttgtcagaaaaccccataaaataagatttcgaaataaaacatccgttcgtgtcagaacataatcactaccttgacagggtagaggtcgctggttcgagcccagtcggaatcatagcttaaacccttgcgcagcaagggttttttattttgcgttaataaagccggttcgtcaaattcgtgagttgttggcgaactgttggcgaaattcattgaccgcagtccaaaaactacctccaaacttacttgattagttcaatagtaacaaacggaagatcggatttctgttaaatcttcattgagaatagccagtccaagaccgtcacttcagccatgcatcttttaaatgaaattttgtactgaaaacatcaattgtatttttaaattctgctctagaatcagcccctttataataatcttgataaattgcttggggtgatactgattcgtgatttgtgctatggtttgcaaggcttgtagcaaaagcaggagcaacagaaacgagtaaagcaagggataatgcagaaccagttaaagctgttttcaatttcattttaagcacttccttttttaaaatacaactttattattaaatggaatacaaaaatatccaaggtgttttttgttagtaagttgagttagggggattggatggcacttagaatattgtttctgctgatgggatgttgattctggatatatttccaacacgattacaggccggacatgaaagcgaaccttgctttgatcggggcaatcatttcatttaaagctgcggtttactttaaagatattgatgtattgagagaagaggaaaacaaatgaacggaatttctgagcgttggaacgcgtttaaattacaaaaatcccctgaaccactctagatcaggggattgctttcccaacagcttattaagtagcggaaggcatgatcaacgatttagtatcaatttattaattgcgaatactagaaacataccgttttccgccttccttagaagtaacatattcccgaggaacgttaagtctattggtagaatgataacttacataaagtttcatatttgctcggctcgttacgatagccgtatgatccatccaaccatcagcatagcgaagacctattttattatggtaatcatagtgatatacatctccaagctttacatttgaatatgtatcagaaacagtcttcatttttattccgccagcttttaaaatgtatgatctaaaggctcctgcattaacccaagcatctgtatagggtttccattctttaaagtacggcattcttccagctcttaatgcttgggaaacaaagttagtacaatctttgtctttataatatttatagtttttatttggttttaaggcatatttttctgcatatttcattgcagcgtaaccactatatcctttaacagatgttgcagtcacagttagttgattagagttagcagcattgaagttcatacttactggtttatcttcacttttcacttcttctttatcatcatttttcacttcttgcttataattttttaaaaattcatctaatttaacatccgaagaatattcttcatcattttcatattgtagagttgaagaagaattatttaattgtgttacatttagttgcttagaagaattactcaatggtattacatttagttgattagaagaatttttaacttgagagaaacttagattagaagtatttgttgattgagaactttgtttattagaagttgttttgggaatttcaagtttaatattatcgcccagagatgttgttactttttcaacaccaaaaacaaagtttcgagtaatataagcttcaacaattagcttattgtttttttcagaagtcttaacatcgtctatatcgtatgtaaactcgtggaatttttgtttgtccactttacttaacgcagaatacagtaagactccttcgtcggaatcagtcaatttagactctttaggatgcgctaaaggagtgttgtgttcaaaatcatatttctgttgttctaacatatccttaactttttcgtaaccaatctcgttggtaattgaaacattttctttagtctctttattagtagtggctgcaaaaacttcatttgttgacactaatggtgacaatgatagacataaaactagtgaagaaagtaattcttttttcatacgaaacctccaataaaatctaaatataagtaatatttatcatttacaccaattgaaatatggcataaaatacatgtaataatataacataaaaataaatacataaaaaggtatcggaggaaaaaatgaaaaagaaaactaaaattatactttctctcttgacagcacttattgttatattgatagtacttccagttctatctcctgttgtctttacagcttcttcggaaaaaggagcaatcagacacgaaatttataaaagaggatatccctaccaaagctactttgcagttctccagaaaagagaaggagacaatgaatctgggaatctttattatgtaaattggctagattggaaagatgaaacagggcaaactcctcacttatgctattcgaaaaaagcatcagatggtgaatacgaagtaagttgtggcacagggccgtaaaaataaattttaaaattgaataagtccaagacggaaagcctgcagacactgatcgttttacagagaaatttgtgcttcgatcggtgtccgtttttttttcgcaactaaccatatgtctatcgcgattactagctatgaaaggagtaattagacatgaaacagtccaaaaagaaaccatcatagaagcaacatgagcgcttagatcgtttctggcaacaaatgatgaacactaacatgcaaacactcagacgtggcaaaggcggcgcaccacagaagaatcaaaacgctgtgactcacggctttttctctaaattcctgccagaagaaacgcttgagatcatggaagagattcaggagcgttcgcctgctgatatgatatgggatcagatacagattcagtatgcagctattatccgggcgcaaaagatcatgttcgtttctgataaggaagaaatgatcaaagagctgaaaaagaaaaggtccctcatatctgaggtcagcgaaattgaagatgggcttgtcatttgttttagtacgtggtttcgctacagactttacagtgaaactataccaaacatatttcacaaacttgataaaataacttttaaaccttcctataaaatgaaggttttttatttgatttcaatttttaaatcctttacatacagcgattgattaactcgagcaatcaatgtcgcagttatatttatttttcaagaaaatgttataatgaaaagccataaaatgataggagggggaatttcgatgcattacataacggcatgtttaaaaatcatcagtgataaagaccttaatgagataatgaaggaattcaaaaaacttgaggaagaaacgaacaaagaagagggttgtattacattccatgcttatccgcttgagccatcagaacgtaaaataatgctttgggagatttgggaaaacgaagaagctgtgaaaacccatttcacgaaaaaacacacaatagacgttcaaaaacaagaattaacggaagtagaatggttaatgaaaagcaatgtgaatgattgaaaggctctttaaaaaaaagacattcaatgacttagaatcagccacttgtgattaagtagtaaattgttgtccaactcttatttttttctatttaatattttttgagacgaaaatgttttttaaagctgattttaaaatgtattcaaagtcagctctgtttgatttaatggattatattctttggataacttgttaccatcataatggagatactccgtataaattggaggttaaaataatgagtcattctcaagaaaaaattgcactaattacaggagcaagcagtcaaggggatattggtacggctatttgtcgtaagttagcctcacagggtatacatatcttctttactcactggaattctgatgcggcctggatagaagaatttcaacaagaaattttacgtatgggtgtccgctgtgaggcaatgaaaattgatttatcagatgcacatgctgcattcacaatacatgaaaaaatttcagataaattaggatatccttccatccttattaataatgcagctcattccgcaagtgataattatgtatcgttagatgctaaatcacttgatgagcattatgcggttaatatgagatcgaattttcttctttgtgttgaattcgcccgtcggtttaaaaaatctaatttaatatcaggaagaatcatcaatatgacatcagggcaggatttaggtcctttgcctggagagttagcgtatgcagcaactaaaggagctatttctgcatttactaggtcgttatcacaagaacttgcaccattgggcatcactgttaacgccgtaaacccaggtccaacagattctacatggatgacagatgaaataagaaattttctttcacctaaatttccaatggggcgtattggcacaccagatgatgcagcacgaatgattgcttttcttgcaagtgatgaggctgaatggataactggacaaattattcattcagaaggtggatttattcggggctaagctactgaaacacaatatacaccaatgtatgatgtattcccaaaactaaatctaaacttgaagcgaaaataaggtcccttctctttttagagggggaccttattttattcatgcatgttttgcatccagaaaatctggcggataaagattaataaaccgttacatatacttttccgaatactgcagtacctttaaacaaagtaatcgtggcttttccttttgatttagccgtcactaaaccattttgatcgacttcagcaactttttggttatcagtccaataacgagtagctgaattatttttaacagaataggtttctccaacttttagaggtaaatcatagtcttgaattttgataacatgtgtaggtgaaatagaaatgttctttacctcagtaggtgtggagtttatttcatgagctgaagctaccccgctgaccgacagagctaacgcagaaatcgataaagcagaaacaacagtttttttgaaattcattttgaaacactcctttaaagttttttgtcttgcactataacaattcaataaaagtaattattttccttgtaaataaatgttaataatatgtgaacgatcaatttatttgagctaagaatattgtgtgccctgcacagagtttgtatttatgatggaaaattgctgagagagaatggccatccttaaaatgttaatagcacacatttgatgggtactagtttgttgagcgtgtgggaattttgttacctgcactttatccccgaagataccaaatcatttttcttcatcatgttcttactttcgtactcatacattagaaaatcttcgttctaaataggtgaagaacattggagtatttttatgaatttctgctgaataacgataaaaaatacattacatagcaaactcaaagaatataaaaatcgcttttttccggatgtttcggtaaaaaacgaaacttttgtctctatgattttattttataatgtaaacggtttcttatatagtatacttatactatcaatttgctcaagtagatactgacaggaaggatagaaaaacagatggaatacataaatacaagacaaaaagagattttgtatctgttgttatctgaacctgatgactatttagttgtgcaagatttcgcagatagggtacagtgttctgaaaaaacaatccggaatgatttgaaagtgattgaggattatctcaatgagcattctcatgcacagcttattcgaaaaccagggttgggcgtttatttacatatagaagaacaggaaaggacctggctaagccaacaattacatactgaacatttttcttctaggcagcggagcgatgaagaaagaatgctgcacattgcttatgacttattaatgaatccgaagcctgtttccgcaaaagacattgccgctcggcattttgtcaatcgatcttccattaaaaaggatttatacgcagtagaagagtggctgaagcgttttgatctcacactggtttctaggcagcggcttggattaaaggttgaagggaacgaaagaaataaaagaaaggcattggcaagaatatctgatttgatccacaatacagcgtttaccagccaatttattaaaagtaagtttttacattatgaagtagactttgtgacgaaagaaatcaaatcattgcaaaaaaagcattccctctatttcacagacgaaacgtttgaaagtttgctgctgcatacattgttaatggtccgccgcatcaaaatgaagcagccgatttcattgtccccaaaagaaatggcggcagtaaaaaagaagaaagaatatcaatggacatttgcttgtttacaacggctcgaaccggtttttgcaatccgctttcctgaagaagaagccgtgtacttaacattacatatattgggcggtaaagttcgttatccattgcaaacagaagagaaccttgaaaatgctgtgcttcctaaggttgtagggcatttaatcaatcgtgtttcagagctgaaaatgatggattttcataaggatcaggatttgatcaatggtttgaacattcatctcaatactgtgctacaacggctgagctacgatctttctgtagcaaatcctatgctcaatgacatcaaaaagatgtacccttatttgttccaccttatcattgatgttttggaagatatcaatcaaacttttgatcttcttattcctgaggaagaggcagcatatttgacattgcattttcaggcagcgatcgaacggatgcagggcagcagcgagacacataaaaaggcgattatcgtctgccacatggggattgggatgtcacaattgctgcggacaaaaattgaacggaaatatcaccaaatcgctgtaatggcttgtattgcaaaggccgatttaaaggattatatcaaaaagcatgaggatattgatcttgtcatatccaccattgcgctggagaatataacggttccccatattgttgtgtctccgcttttagagcctggcgaagagaagaaattaagtgcgtttatatgtcagctgggcgaatcacaccgccaaaaacaaaaaacgtttcagatgctgaacaatacgactccttttttggtttttttgcagcaggaggcagagcaccgctacaagttaatcgaacagctggcgacagctttgtttgagaaaggctatgttgataaggactatgcggttcatgcggtgatgagggaaaaaatgtcggcgacaaatattgggtcaggcattgccattcctcatgcaaacgctaaatttattaaacaatcagcaatcgcgattgccacattaaaggagccgcttgaatggggaaatgaaaaagtttcgctcgtttttatgctggctgtcaaacacgaggatcaaaccatgacaaagcagctgtttagcgagctttcatatcttagcgagcagccggccttcgtccagaagctgacgaaagaagccaatgtcatgacatttttatctcatttggattattaaaagcagggattattccttgcttttttttgttatagggaaaaatgcctttattaccggaacctatggtaaaaaaaagcgattttaatgagctgatttcggtatacagttgagacaagatcttataattcacactttaaaggagggttcctatgaaactgttagcgattacatcttgtccgaatggaatcgcccatacatatatggcagcggaaaatctgcaaaaagctgctgacagactgggcgttagcatcaaagttgagacccagggagggattggtgtcgaaaataagctaaccgaagaggaaattcgcgaagcggaagcaatcattattgctgcagaccgttcggtaaacaaagaccggtttataggcaaaaaactgctgtctgtgggggtacaggacggtatccgcaaaccggaagaattgattcaaaaagctcttaacggggatataccggtctatcgttccgctacaaaatcggaatccggtaatcatcaggagaagaaacaaaatccaatttaccgtcatttaatgaacggcgtttcatttatggttcctttcattgttgtcggcggattattgatagcggttgcattaacgcttggaggggagaaaacacctaaaggcttagttattccggatgattccttctggaaaacgattgaacagatcggcagtgcttcattttcatttatgattccgattttagccggctatatcgcctatagcatcgctgataaaccggggcttgtgccaggtatgatcggcggttatattgcggcgactggaagtttttatgacagcgcaagcggcgccggattcctcggggggattattgccgggtttttggccggatacgctgcactttggatcaaaaaattaaaagttccaaaagccatccagccgattatgccgattattattattccggtgtttgcatcactgattgtaggtttagcgtttgtatttttgataggcgcgcctgtagctcaaattttcgcctctttaacagtttggctggcggggatgaaagggtcgagctcgatccttctggcattgattttaggggcgatgatctcatttgatatgggcggtcctgtaaataaggtggcgtttctgtttggatcggcaatgattggagaaggaaattatgaaattatgggaccaattgctgtcgccatttgtatccccccgattggtcttggcattgcgacgtttttaggaaaaagaaaattcgaggcatctcaaagagaaatggggaaagcggcatttacgatgggtctcttcggcattactgaaggagcgattccatttgcggcgcaggaccctctgcgcgttattccaagtattatggcaggctcaatgacaggttctgtgatagccatgattggcaatgtgggagacagagtggcgcacggcggacctatcgttgcagtgcttggcgcagttgatcatgtcttgatgttttttattgctgtgattgcagggtctcttgtcactgctctgttcgtcaatgtactaaaaaaggatattacggcgtctcctgtgctcagtgaaactgcaccgacctccgcgccaagtgaagctgcggcagcaaatgaaataaagcagccaattcaaagccaaaaagctgagatgtcggaatttaaaaaactgacagacattatcagcccggaattaattgaaccaaatttatctggggaaacgagggatgacatcatagatgaattgattcagaaattgtcccgaagaggtgcgctgctttcagagagcgggtttaaacaagccattttgaatcgtgaacaacagggaacaacggcgattggcatgaatatcgcgattccgcacggaaagtctgaggcggtcagggagccgagtgttgcctttgggatcaaacgatcaggcgttgattggaatagcctggatggatcagaagctaaattaatctttatgattgctgtaccgaaagagagcgggggaaaccagcatctcaaaatactgcagatgctatctcgaaagctaatggatgacaattatagggagcggctgctctccgtgcaaacaacagaagaagcatacaagctgctagaagaaatcgaataaagcgggggattttcatgacgactgaaccgttatttttcaagcctgttttcaaagaaagaatttggggcgggaccgctttagctgattttggctataccattccgtcacaacgaacaggggagtgctgggcttttgccgcgcatcaaaatggtcaaagcgttgttcaaaacggaatgtataaggggttcacgctcagcgaattatgggaacatcacagacatttattcggacagcttgaaggggaccgtttccctctgcttacaaaaatattagatgctgaccaggacttatctgttcaggtgcatccgaatgatgaatatgccaacatacatgaaaacggtgagcttggaaaaacagaatgctggtacattattgattgccaaaaagatgccgagattatttatggccacaatgcaacaacaaaggaagaactaactaccatgatagagcgtggagaatgggatgagctcttgcgccgtgtaaaggtaaagccgggggattttttctatgtgccaagcggtactgttcatgcgattggaaaaggaattcttgctttggagacgcagcagaactcagacacaacctacagattatatgattatgaccgaaaagatgcagaaggcaagctgcgcgagcttcatctgaaaaagagcatcgaagtgatagaggtcccgtctattccagaacggcatacagttcaccatgaacaaattgaggatttgcttacaacgacattggttgaatgcgcttacttttcggtggggaaatggaacttatcaggatcagcaagcttaaagcagcaaaaaccattccttcttatcagtgtgattgaaggggagggccgtatgatctctggtgagtatgtctatcctttcaaaaaaggagatcatatgttgctgccttacggtcttggagaatttaaactcgaaggatatgcagaatgtatcgtctcccatctgtaacatagcagggcttgagaaataaatttgcgagtgaagacgcctattctgcagcaatgatctaaataaaataagagtttaatagttggagaagaaatgttacactcttttctgtatatggtaaagaatgaaaaaacacgattcggttggtagtccggatgcatgattgagaatgtcagtaaccttcccctcctcgggatgtccatcattctttaatatcttttatgaggagggaatcgttatgaaattaacgatttactacgatgatcagttttgggtaggcgttgttgaagttgtggacaatggaaagctaagagcctttcggcatctttttggcaaagagccgagggattctgaagtattagagtttgttcataaccaactcctgaatatgttggcccaagctgagcaggaaggagttcgtttacaaggcagacgtcaaaaaaagatcaatccaaaaagattgcagcgccaggtttcaaaagagttgaaaaacgccggagtagcttctaaagctcaagaggcgataaagctagagcttgaagcaagaaagcaaaagaaaaaacaaataatgaaagaacaacgagaacatgtaaaagagcaaaggtatatgctcaaaaagcaaaaagcgaaaaagaagcacagaggtaaataatccaaacaaaagcaggcgcagtgcctgcttttgtaattaaggactctactttgtaacatatatccaatgtttatactccgctgatttatgattcaatataaaccctaacttctccaaggttttttgtgagcctagattatcatgttcgcatcttgcggtgatccgggatactgtttctcggcttaatgcccagtttattagtttttgggcggcttccacacaataacctttgcggcgatgacttttatttgttgcaaaaccgatttcaatcatgccattttcgtctgggtcacctaaaaatccagttcctccaacaatttcatgactgtccttctttacaataatccatgaatcaaatccttttgttccattgtttttgactaaaatctcgcggaaataaggtatcgcttcaaaaaaatcagaatttggccattcaccatttgtttcataacctaagtctttgatagcctgatgatcttgtttagacgcggcgtcaagaaggggaatatcaatcgtttttaatcgtaatcgattcgtttcaaggagaaccatatatctaatcctcttttctttttactgggaataatgataacatataacaattttctctgataccttggcagtagagaaagatggaaaaattgagggggattgaaagagtgacaggggagagtttgcccagaccaaaaacgggtaggaaaatgctgatgttaatgtgtccctacccgtttttctgttcctgaatgcagggtttctgataacatgttgtgctaccttttcgcaatcaaataaagcgatatggctctttgggtttgaacaggattatgaatgataatgacccattggtttcttcgtcttggaaagcttgctaccgcatacaatggagcagtatcgcgcggagtgaacccaccatttatcacgttgatatctcttccttcaagatgacaaactaagtattcacctggattgatgacctgttggttcgtccatgcgtaagaataaaagccgtctccaagatcttcggtggaagatggggggacaaagccatctacagtcaatgtgatttctcttcttcgctgtctttctgaaaaatctggacttctttgagggttatgagtatgtgaaaagtaaggaattaacgcagggccataaaagtaatgatacaaagcaaccactcctttattttccattcatacaaattgtatgtgggagttatttgttcattcctgttttgttccatgtagactaataatgggctataggcgtccaaggaaatcaatttgtcctttcgttgattcaatgctagtaaccttgaaaatgcaggttaggatgatagaatttacttattactgcaagaagttagatatacatcattttgatagtgggtgaaaacaatggcgaaaaaaatggcaaaaacaaatgcggttcgtctgatagaacagcagaacatctcttatgaggtattagggtataaaacagacggccagccggtagatggcatctctgttgcggaaaaaatcggttatcctttgaaatatgtatataaaacgttggttgcagcaacaggaacaaatcattattatgtctttgttgtacccgttgcagaagagttagatgtaaaaaaggcagcaaaggtgacaggggaaaagaaaatagaaatgattgcaatgaaggagctgttagcggtaactggctatcttcgcggcggctgctcgccaattggcatgaaaaaattgttcccgacctatattgatgcatctgcagaaatgcttgattttattattgtcagtgcagggaaaatcggtatgcagctaaagttggcgccacaagatttagccagatcatgtgatgccgcatttgcagaaattgtatagatgcagatataggggaacgaaaaagcttagtcatatcgactaagctttttccgcatccctttcaaatatgatttcaaaataagcagctgccccatacccatctatactgggagcgaaaatctgaacgaatctccagcctcttttcgcataatcatggatgatttgctggtagtcttctttaggccttcttctcatcgtactcagctcaactcttacgaattcatattctttcatcgtttgatccctcctattaaggtatacgtaaaatggagcgagaagttccgaaaagcctcactaaacacagaaacatcttgaagagttaaggggctataaaaacgaatttcaccgggtcagcagtccaaatgaatctcttgcttattgcatttgactgagtatataagtaaaaaaagagcggtcagaacatataagaaggagatgatcattaacgcactcataacagggtagtgtttagcggagtagatgaaaaaatcaagctgtgaaatttgtttggggctgctgacggcatcaattccatttagcagttttgagagtttagcagtatagttccaatcaaatcgatctgaaacaagctcgcttccttgataccaattaacagcagctaaaaacagaaataccataatagaaaatccaagctgaacaactaaaaatattcccttcacttttgtatgacctccaaatctatgaatatgggaaaatcaaacaatatattaccaccgtatgggttattcttgcaatttcactttcatacaactcaaacgcaagtctatttttttgtttgtttttggcttataatacctgatgatggaaaaagagtgcgggtttatagattagagaaacaaatgtatttcttagcattttttatttgtggagagagtatagaagcattcgattagatctgctttttcacagaaacgcttttcatctgtttgcctgagctttacaattctggcaaaaaaacaatgatttctttcaatcaaaacatgcaacgatgcgacatattttatatcttgatgacttatctcattgcctttaagtcattctatcgagaaagtgatggtattttatgaacaaagaaaccctaaaaaacatactcatgattttttcaatatgcgcaaccctccgagaaaccgatggtatgcgcatagctgatagctggattttgagtgagattatacgatttttgatttgcatggctgtgttttttgccatgacatttctattagatgctgtttttccaaacaaaaaagagtcacattaatgtgtggctctttttgcatcatctgatcagaaacatcataaatgaatcgatcatcatgatgaagaacagcaagcaaaaataaataagcgagtagacaaacatatcctttgcccacttcacgtcatcgtctgttttgaatcctttgatgctttttttgatccatatgcctccgagaaccaaggcggctaagaaataaaatgggcttatatggccggtgcctagagagaaaggaaataatagcgtgaccggcaccaggacggcaatatattgcatcatttttatttttgttacatgattgcctttgactactggcaagagcggaacgccagcagcgcgatattcctctttgcgtcttatcccaatcgcccaaaaatgcggcggctgccacagaaacataatcgtgtacaacagcactgctgtcatactgaagtcaccggttacggcacaataccccatcaatggcggcgcagctcctgggaagctcccgacaaatgtgctccacacagacgttcgtttcacccataccgtatagatgatcgcataaaaaataaaggcggccagtccgagataggccgttaatggattgagggaataaagcatggcaaggcctgcgatccctaaaacagagccatatgttaagatcatggctggcggcattttccctgtgaccgaggccctgctgcgagtgcgtgccatttttgcgtccatatgccgatcaaaatagttgttatagacagtgccggaagccatcacaaacgcggttcccaacattgctgttaccattgtcatcaaaaaagccaagccggttaacgttttttctgcgcttgcaaacgcgatccaaaacccgccgaaggctgctatcgagtttgatatgataatgcccggctttgcaagtttgataaaatcgtaaatggttacccggttcgaagcttttatgtattttgtttcagatatggctgcagaatctcttgtattctccaaaaatagacgcctcccccaaaactgcatgcttttgttatcgtaacaagagggggacagaatcacaattatttcctatatttgtcatgatattgtcatttttaaaacaaaaaaatggggagctggactgcccccattttgatatgcggcgactagtaaccgtaacctccgccatatcctccgccataaccgccgccgtaaccgtgccaagggtagtaaggcggtcgcgggcgcgggtagtaataaggcgggcgcggataaaacgggtagaacggataatacggtcttggataataataaggcggataaaatggcggtctcggacgcggataataataaggctgtctttcatcataaggggtaatttgttcaaatgactgttcattcaaagggtaatccaagaggaaaacctccctagctttttttattccttttaccatattcctgatgcttaagttgggtgtatgtacattcatgaaattcggttttttttatgatgaaattccttaaaaaggattgacatgaacttctaaatctcatagtattacaaatgtgaaataaatgttactacaatgttacaaaaacatttctaaatagatacagttccaactgatgaagagtaaatcgaaatggctacgaaagaaggagtttttgttgttggcaaaaagaatcaaatggtttcatgtattaatagcagttgtatgtgtggtgggccttatcggctttttccataatcattcattgaaaaaagaaacggtcatgaataaagtaagaactgattctcaatatgggaatgttgagatcgcaacgcttgtgaatgacgggaaaacttttaattacgcggttaactatcccgttttcaaaaatgaaaaaatggattcggcattaaaaagattcgcagaaaaagaggttcgtcaatttcaaaaggaaacaaaagacgttgaccaagagcatacgacaaaacgcaacgaattaaatgttgattataaaattgtccattatgccaaacagacagtggcgattgtatttaatgaatataaatacatcggcggggcacacgggcaaaccgtgaaaaaaacgtttaactatgattttagtaaacaagcgtttctttccattgatgatattttcaaagaggacgctgactacttacataagctttcgttaatcgcttatcacgagctgaaaaagaataaggacattgccgcggacgatgcactgttaaaggaagggacggctccgaaaaaagaaaatttcagccgctttgccatcaaggaggattatatcgaactttactttgacacatatcaggttgcagcaggctatcttggagagcaatcgattgccattaagaaaagtcttttgaaagacattctgaaagaacaatatattgataaagcaaaaaataaaaataaaatcaaagaacaaaagccgaagcatgaagtgatttctttacccaaagaggaaacggttgatccaaatcaaaaagtcattgcgcttactttcgacgacggcccgaatcctgcgacaacaaatcagattctagactccttgaagaaatataagggtcatgccacgttttttgttttggggagcagggttcaatattatccggaaacgctaataagaatgctgaaagaaggaaatgaggtggggaaccattcatggagccatccgcttctcacaaggctttcagtgaaagaagcgttaaagcagatcaatgatacgcaagacatcattgaaaaaataagcggataccgtccgacgcttgtaagacccccatacggcggcattaatgatgaactgcggagtcaaatgaaaatggatgttgcgttatgggatgttgacccggaagattggaaagaccgtaacaaaaaaacaattgttgaccgtgtcatgaatcaggcgggagatggaagaaccattttgattcacgatatttaccgcacctctgctgatgcggccgatgaaattatgaaaaagctcaccgatcaaggctatcaattggtgacagtttctcagcttgaagaggttaaaaaacaaagagaagcgaaataaattaaaaaaggctgtccgtacggacagccttttttctatttaataagagcctgtggtggcccaaacatttaagtttggtcctgaatacttgccaaaagcgtaagaagtccttggatctaaatcatataccatcggtgtatagcaagacttttggccggccaccgcttttccattgccgcctgcagaatcacaattatatctctttccgtccgtgtttcgggtaatctccgcatttgcttcaaagccagacgtcaatgtattattcatcgtgatttttgcccaagccgttttacatgtactgctgaatttaagctcgactactccgatgacttgattgctggcattcactaagtttgaggatttttttgtagagccgctggacgcacaatcattgtaataagggctttttccatcgtaggcatgggtttccgcattggcgggtacacctttgacggcaaaaacaaatactactgcaaataacaccaatgaagccttcgtaaacagtcttttcatatcctttatgacctccttaatatggcaaacaataaatcatacggaggaacaatcaaaacatgcatgcttttttgtgaacaataaaggcggccgggaggatggagttcttggccgcctttgatgtgaggttaaacttttacatcaatggtttgtccgagagtcggatgctgaatcatctttaaggtttgatcggcattttgctgggcggtatccagcatttttttcgttaaagcgatattaacattctgggcaagggatgcttgatgcattgcaaccgataaagcaggaatatccatcgttccacctcctatgccttacctatcggcggctttgtatcattttacagtgaaaaatggcttaattttcgctgttgacccctacgctgcggcatatcgtatgtttttgacaaggagggaatcaggatgaatcttgtcatggaaaagacctttgagcaatacgaaaagctgttttcaatggaagaacagaaaagagaagatgaatttcggtatacgatgatgaggccgtttgaaaagatgtggaccgccatccatgttccgctgaaagcgaaggagccaaacggctatgatgtgatcatggctgcgaaaatgcttggctatttggatgtccgtgatgttgaaatcggacagaaagcactgcgaatactgaaagaatcacatgtttcagagactgcggaatctgcacttcggcaatgcatattttttgatgagcgcgaacagctgcgggtgaatgcaaaggagatcaaattcggcctttatatcgctgatccaaataagcttcagctgcaaaaaggctactgcgggtttggcgggataccgggctttattcatgtatggattgatccgaaccgttataacctgccaaggattccttccattattgctcatgagtttcatcataatttgcggttttcgtatatagattttcatcatggctctgtaagtgtcggggattatcttgtgattgaaggattggcggaatcattcgccagagagctgtttggtacggaacgattgggcccttgggtaactcgttttgatcatgaggatttgcaatattccattgatgtgattaatgaggtgttggatgtgaaaggattttcggaagtcagccgttatatgtttggtgatccaattgctaaagacaaaggatttgaacctgtaggtttatcggcttttgcgggttatgcagttggctatcatgccgttcagtcatttatgaatcaacatcatatcacgataagcgaggccacacgtttggatgcgaaggccattctttctcagtgcggattgttttccaaatgaaaaaaagcgtcacatacagcggcgctttttgattcccaaaaccagcagttctatggcggcacaggcggcaattccgattgtatatgcttcgatatcgctccataaaaaaccgtaccctagtacaagcccgccaagagaagtatctctaatctggtcgatccattcggcatgatagagctggctgaattcaatgacaaaacagaaagaaagactgataatgcccgttatcattgtcttcagcttccgaaatagaaatccgcatcccgtgaagatcatggcggcccacaacgagtctcccagataagtattgagggtatcaggaagaacactggagaatgctctggatccaagccccagcccaatgatcagtatggtgaaaactgcatatatccaacgatttcgcttcattgcgaattgataccccgtctctgcttcatctccctgtattgtaaggaatatagcttttatttgtccactaaaaaagcggctgaatagccgcgtagggtgtttattttgcttttaggtttacatggtcggctgtctgatccgtgcctattacaaaatggagttcatagcggcctgtatcatatacataatcgatttcatcggtaaacgggacggttaacacccgatttgctggtcctaattgcttctgcagcacttccggcgtaactccgcctaaattcagctgccgttccacaccggttccaaagtatcggatttctgaaattgtcatgtctttatgataggaaaatccgtagcccggctgtcccatattccagtgatataaatcaaatcgattgtctcccccgactggtctttccggttccccaaacgcagcgtggacatccccttttgtgcttttgttaatggtaaggccttgcgcctgctgaggcatttctcctttgtaggcggtgttgtaaaggtttttgacgagctcggaggctgattgggttgtattttcatagagtgtatttgtttgagctgcggcctttgccggtgctgaaaaggacgcagccccaaagccggtaaaacagcttgttactgctgctgccgcggttatagcagacattgtctttttcatgttaatccctcctaattgatctaccattccgtttccccgtgtttttgcaacgaaacatgtgagtgcgctttgtatgttttattgagttgttgtaagggaactgaaataggtaattcggtatataaagcaagaaaggggaatggagatgcctggcaagaaaaaaatcacaataaacggcgttgaaatggaagcgtccgaggaacagacggtgctgcagcttttgaataacagctcgattgaagtgccgcaagtttgctatcatccaagcttagggccgattgagacatgtgatacgtgcatcgtcagcatcaatggtgagctgaagaggtcgtgctccgctgaattaaaggatggggatatcattgatacgctctcacctgacgtgaaaaaagcgcaggtcatcgggatggacaagattttatataatcatgagctttattgtacagtttgcgattacaacaatgggggatgcgaaatacataatacggtgaaggaaatgaaaatcaatcaccaaagcattccgtttgatcacaagccataccataaggatgaatcccatccgttttatcggtatgatccagatcaatgtattttgtgcggacgctgtgttgaggcatgccaggacgttcaggtaactgaaacgctgaccattgactgggagcggaaacgcccgcgcgtcatttgggataacgacgtgccgatcaatgagtcgtcatgtgtgtcatgcggccattgttcaacggtctgtccgtgcaacgcgatgatggaaaaaggaatggaaggggaagccggatatttaacaggcatcaataacgaaacgctgcgaccgatgattgagatcacgaaaggcgtagagacaggctacggctcgattctcgccatttctgatatggaatcggccatgcgtgatgaacgaatcaaaaaaacgaaaaccgtctgcacgtattgcggcgtcggctgcagctttgatgtctggacaaagggcagagacattctgaaagtagagccgcaggaggaagcgccagccaacggcatttctacttgtgtgaaaggcaagttcggctgggatttcgtcaacagcgaagaacgcctgacaaagccgctgatccgggaaggcgatcatttccgtgaagcagagtgggaggaggtgttatcgctgatcgccagcaagttcactgaattaaaagaggcgtttggcccggattctctcgcttttattacatcttctaaatgtacaaatgaagaatcctatcttatgcaaaagctggccagaggggtcattggcacaaataatgtggacaactgctcccgctattgccaatctcctgcgactgccggcctgttccggacagtcggctatggcggtgattcaggatcaattacagatatcgcgcaagcggaccttgttttgattatcggttcgaacacgtctgagtcgcatccagtcttatccactcgcattaaacgggctcataagctgagagggcagaaagtgatcgtcgcggatatcagaaaacacgaaatggcagaacgctccgatttatttgtccagccgcgtgccggatcggatatcgtctggctgaatgcgatcgccaaatatttaatagaaaacggcaaggccgatgaacgatttttgagagaaagagtgaacggacggcatgaatatgtaaaaagcctcgcgccgtacacacttgaatatgctgaggagaaaaccgggattgatcaagaaacccttatccaaatggcagagatgatcgggcaagctgacagtgtgtgcgcattgtgggcgatgggcgtgacacagcatattggaggaagcgacacgagcacggcgatctctaatctgctgcttgtgacaggaaactacggaaaaccgggagcaggttcttacccattgcgcggccataacaacgtgcagggagcaagtgactttgggagtatgcctgacagactaccgggctatgaaaaagtgacggacgaacaagtccgccaaaaatacgagcgggcatggggcgtaccgctgccgaaggagccgggtatgaccaaccacgaaatgattgaaaaaatccattccggacagttgaaagcgatgtatgtaaaaggtgaagaaatgggccttgtcgactccaatatcaatcatgtacacgctgcatatgaaaagcttgatttctttgtggtgcaggacattttcctttcacgtacagcggagtttgctgatgtggttcttcctgcgagcccaagccttgaaaaagaaggaacgtttacaaacacagaacgccggattcagcgtttgtatcaggtatttgaaccgctgggtgaatcaaagccggattggcagattattatggaggttgccaataagcttggcgccgactggctctatgagcatcctgcagacattatggaggaagcagccaagctgtcgccgatttatgccggtgtcacctatgaacgtcttgagggctataattccctgcaatggcctgtaaacgctgatggaaaggattcgcctttactctttacagagcgcttccctttcccggacggcaaggccattctctaccctgtccagtggacagagcctaaggaattcggtgaggaatatgatatccatgtcaacaatgggcggctcttggagcacttccacgaagggaacctgacttacaaatcaaaagggatttcggagaaaacaccggaagtgttcttagaaatttctcctgagcttgcggcagaacgagggattcaggacggaaccctcgtcagactcacatcgcctttcggaaatgtcaaagtgaagtgcctgattactgatcgagtcaaagggaaggaagtatatctgccaatgaacgattcaggggaagcggcgatcaacctgttaacaggcagccatgccgataaggataccgatacgcctgcttacaaagaaacatcggccaagatggaaattttgaagcacgacggaatcagcccgctgcctaagatcaaccaccgcaacggcaatccgcagccgcaaatcggtgtgcaggttcataagaaatgggcgcggaaggattatattttccctggtgacgctgtgaaaagggggatgggccataatggctaaagcgattaaacgaatccaaaaaatcgaggtaacagaagaggatcagcgaaagcgtgatttgcgggaaattgaagatgctctaattgaccacaaagaagcgattctcgaaacattgcatatgctgggccatatgaacgagcgcggtgtcctgccgttgctccgcggcctttttggccaaggggataaagttcttgatatcctggtgaaaaaggcagatacagaggaaacagccaatacgctgaaaaatctgcttcttctgtttggaacactcggcatgctggacgtgaagcagctggagcctctcattttgaaagtgaatgcgggtgtggcaagcgctgtagagcagaaaaacagtgaagaaaagacaggttattttgatattatccgctcgctaaaagacccggaaatcaacaaatcaattacactgctcttttcctttttaaaaggaatgggacaagatacaaaggagctggaacgcacgacgcagcctccggaacaccaaaaacatcatcaggaacctcgagagaaaagaggaatgaataagcgagattgacctcccacccgagcggcttcagccagctcgggttttttgatgaaaaggtctaatggactagtaaaaaatattcaaatactaggaagaagtaagattgtgatgaatgagatagaaataatcgttactttcttacctgttaagaaaaggaaaaatctgattataatagaaatcgattactttagatgggggaacaatcatgaaaaaagtcttattactattatttgtcttgacgatcgggttagcgctttctgcgtgcagccaatcgagcgatgcgtcagagaaggaaaaaccgaaagagaaaaaatcgcaagaagagcttgaaaaggaacttgataaggaattgaaaaaaggcggtgagccgaagaccaaaaaagatgatcaaatacataaaataggagaaacatttaaagcaggacatacgaattttacagtgaataaagttgatagagtgcaaaaaggtgaatatatgaatgttggcggagctgtaaatgaggagacaaaaacaataaaagatgatgaggaacggcttattatagaagttacgatggaaaatataggggaagattcaataagctacaattttatcgggtttgatttaagagataagaatgatcaatcagtgcggcctgttttttctatagaagagaagggcagaatccttatgggaggaacactagtatcggggaaaaaggttacaggtgtactcagttatgtcatccctaaaggagaacagaaacattacacactggtatataatccgtttttagctgatacaaatagcagtaatacagaagagagagtaaaggacgatattgattacttggtgaagttagattagaagctaatttacagttgcacgtttttcatctgtggaaaacgtgcattttttatagcgaaacttgacttgaaaggatgagtgataaaagtgcaaaccaaatggctggaacgggcacagcgaattcgggcgatcgcacaggctgggcttgctttttccaaggatgtgtacgacagggagaggtacgaagagctaatgaagcttagcacggaaatgatggcggattactcggagaaggacattgaagttatcactgatttatggcaaggcgagaagggctatccgacaccgaaagcggatgttcgcggcgcagtattccgagagaatcagattttgcttgtccgggagaagcatgatgagctgtggtcgctgccgggtggattttgcgagattggtttatcgccagctgaaaacgtcgtcaaggagatcaaagaagagtcggggtacgatacagagccgtctcgattgctggccgtgctagacagccataaacactctcatccccctcagccttatcactattataaaatcttcatcgcatgcagcatgacgggcgggcagggggaaacaggggtcgagacgaatcatgccgctttttttccggaagacagactcccgccgctctctcctaaacgaaacacaccctcacagcttagcatgctgtttgactttttgcgccatccggacaagaaaacgatatttgactaaaaaagaaagagcctatgggctctttcttttttataatgtaatgtgtttttcgttggcgagtttcagaagggtcaaaatagaatcggcttgtttatggccgagtttttgctttaatttgttttcttcaactaatcggctgccataaattttgacagaggctttgtcgacgacagtatgccagttttcctgtttttttccctcaacaagcggtttttcatgtctctcagaaaaagagaacacaaacagtacgaatgcaagtgaaagtaggatgccgacaacttgttttttgtaatcagtctgtgctgccacgttgttctctccttcaccttttaccttctatttaatcatagaatcagcttattttacataatgggaaagtcatttttggagttagtgcatttggttgaaaacagaggcgttttttgagcggagcggtgcaattgaatctatattggctttgcgtgcttatgcctaaggtcacgttgtgaaccaaaacagcagtgcagaatagaaaaaaattgaaagattatggtaagatgaacgaaattcgagggggaatatatgatgcctgcatcaaacatcgtgatcgcctgcctgctgttatcaatttaattatttgtggtagtccctctctttttcgaaagcgggaggtgaagtggaacattaattgctgaattctttcaaggggagtgaccgtacatgaatgtgttaaaccgccggcaagccttgcagcgagcgctgctcaatgggaaaaacaaacaggatgcgtatcatccgtttccatggtacgaatcgatgagaaaggatgcgcctgtttcctttgatgaagaaaatcaagtgtggagcgtttttctttatgatgatgtcaaaaaagttgttggggataaagagctgttttccagttacatgccgcagcagacaagctctattggaaattccatcattaacatggacccgccgaagcatacaaaaatccgttcagtcgtgaataaagcctttactccgcgcgtgatgaagcaatgggaaccgagaattcaagaaatcacagatgaactgattcaaaaatgtcaggggcgcagtgagtttgaccttgttcacgatttttcatacccgcttccggttattgtgatatctgagctgctaggagtgccttcagcgcatatggatcagtttaaagcatggtctgatcttctggtcagtacaccgaaggataaaagtgaagaagctgaaaaagcctttttggaagaacgagataagtgtgaggaagaactggctgcgttttttgccggcatcatagaagaaaagcgaaacaaaccggcacaggatattatttctattttagtgaaagcggaagaaacaggcgagaagctgtccggtgaagagctgattccgttttgcacgctgctgctggtggccggaaatgaaaccactacaaacctgatttcaaatgcgatgtacagcatattagaaacgccaggcgtttacgaggaactgcgcagccatcctgaactgatgcctcaggcagtcgaggaagccttacgtttcagagcgcccgccccggttttgagacgcattgccaagcgggatacggaaatcggggggcacctgattaaagaaggtgatatggttttggcgtttgtggcatcggcaaatcgtgatgaagtgaagtttgacaggccgcacatgtttgatatccgccgccatcccaatccgcatattgcgtttggccatggcatccatttttgccttggggctccgcttgcccgtcttgaagcaaatatcgcgttaacgtctttgatttctgcttttcctcaaatggagtgcgtcagtatcactccgattgaaaacagtgtgatatacggattaaagagcttccgtgtgaaaatgtaatagataaggagactggagattcatgaaaaagtaccatatttcgatgatcaatatcccggcgtacggacatgtcaatcctacgcttgctttagtagagaagctttgtgagaaagggcaccgtgtcacgtacgcgacgactgaggagtttgcgcccgctgttcagcaagccggtggagaagcattgatctatcatacatccttgaatattgatcctaagcaaatcagggagatgatggaaaagaatgacgcgcccctcagccttttgaaagaatcactcagcattctgccgcagcttgaggagttatataagggtgatcagcctgatctgatcatctatgactttgttgcgctggctggtaaattgtttgctgaaaagcttaatgttccggtcattaagctctgttcgtcatatgcccaaaatgaatcctttcagttaggaaatgaagacatgctgaagaaaataaaagaagcagaggctgaatttaaagcctacttggagcaagagaagttgccggctgtttcatttgaacagttagctgtgccggaagcattaaatattgtctttatgccgaagtcttttcagattcagcatgagacgttcgatgaccgtttctgttttgtcggcccctctctcggagaacgaaaggaacaagaaggcctgttgattgacaaggatgatcgcccgcttatgctgatttctttgggtacggcgtttaacgcatggccggaattttacaagatgtgcatcaaggcatttcgggattcttcatggcaagtgatcatgtcggttgggaaaacgattgatccagaaagcttggaggatattcctgctaactttactattcgccaaagtgtgccgcagcttgaggtgttagagaaagctgatttgttcatctctcatagcgggatgaacagtacgatggaagcgatgaacgcaggtgtgccgcttgtcgtcattccgcaaatgtatgagcaagagctcactgcaaatcgggttgatgaattaggccttggcgtttatttgccgaaagaggaagtgactgtttccagcctgcaggaagcggttcaggctgtatccagtgatcaagagctgctcacccgcgtcaagaatatgcaaaaggatgtaaaagaagctggcggagcggagcgtgcggcagctgagattgaagcgtttatgaaaaaatccgctgtcccccagtaaaaacataaaaaccgaaatcaatttgatttcggttttctgtttaaatattttttttcatcccgcatctccggcattctctaagaaattttccgccttttacagagcttttgaacagtgtgtaatcacagttgtcgcagcgcccgctgcgggcgtccggatattcattgaattcgtaaacgatcgatgtatcgtagccttttgtttcatattcttctttttttgtttccatgtcgtccctccgttacaagacgtgtctgctgtttatcttacagcaagcttccggcgtattcaatggattttagaggtttgggtttatcttgatttctcccttggtttgcgccaaaatagctttaataagcttgtatacataaaaagcctatgcaaagaggagaggaaacgggtatgggaaaagggttacttggaaaacgtgtggcaatcggtggctcacgaaaaacggaagaaatcagtacaatcattgaaaaacagggcggaatacctgtcatccggcctctccaaggtacagtttacttagcagagaagcaggtggagccggatttgcggacgtttgcggaagaaaaagctgactgggtcattttcacgacaggcatcgggttggagactcttgtcgatatggcagagaaaattggactgaaagatgaatttctgcaggccattcgccaagcgaaagcggcatgccggggatacaaaacgctgtctgcgctgaaaaagcttgggatcacaccggaagcttcggatgaagacgggacaacaagaggcttaatccgttctttggagcctcacgacttttcaggaaaaacagtcatggtgcagcttcatggcgaaaaagcgccggctctcatggcatttcttgaagaaaaaggcgcgtctgtcctgccgattctgccttatcagcacatcccgccggaggaggaaacggtggagcggttatgccgagagctgatgaaccgtgagatcgatgccgtttgttttacaacggccattcaggttcgttccctgtttgattttgccaaggggcgaggttatatcaatgaagtgaagaaggtattcgaagaacgcgccatcgcagctgctgtcggaaaagtgactgctgaagcactgcgggaagagggcattacgagactgcttgcgccagagattgagcggatgggtgcgatgattgttgagctggccaagtattatgaagaaaaggaataacaagtacaaaaagccgcttttccctcggaaagcggcttttgtctgtcattcattctgcttcagctgctgatgaacggtgaataatgatgggtatgtcagcacgcttaagattacacaagtcagcgcggctgaggccatcgttgtaaacacgattaagagttgaaagcgtactgcctgaatcgggtccgcgccggctagaatctggcctgtcatcatgccgggaagctgaacaagacccagtgttttctggctttcgagcgtcgggatcatactcattttcatcgctgaagtaagaatgcgctgtatggattgcttcggtgtgccgccaagtgacaatattaattgaatttcttctttgcgaacgccgacttctgagttaagccggtttagaaacaaacttgagagcaccatcgaatttccgatgaccatcccgctgatcggaatgacatatcgtgccgtaagcggaatgatatgaagagacagcagaattccctgcgtcaccatttctacgattgctaacgcggcaaacaccctccaaaacgaaccgattgtatttttctttcgcttgatgacattttgcgccgccaccgcgagcattaacagcaccatcagcaggataaaaacagggtggtctccgcgaaaaatcagcgacaaaacataaccgatgataagcagctgcaccgcggaccggatggtggcgatgatcatgtctttttctaccccggctttaaaggattttgataaaaacaaggcgatcaaaacaaagatcatcgttaaagagagagaaaggtaatccattaccgagtgcctcccttcaaaaattctttcgctgcttcatgctgcggagcggagaaaaatgtttcggtttcggcgatttcaagcagccggccatctgccataaaccaaatggtatcggctactcgttttgcctgctccatattatgagtgacccacatgactgtccattttttctcttgatgctgacgtttgatcagttcttcaatctcaagagcagaaaccgggtccaaggccgacgtgatttcgtccaacaatagaatggaggaaggatttgagagcgttctggccagtgacagtctttgccgctgcccgcccgataagtctctggcgcttctgtctaacagctctggcggcagccctgcaagagaagccagcttttcaggagagtacagctgggattgatgcagcctttgtacaagacttaaattgtcacgcactgtcccgtcgagcacgggagccgattgaaacgcgagggctgccgttctcctcagctcattgacattccattctctgacttcctttccatatatgttgacttcgccgctgtcaggcgttctcattaaattacacatagaaaggagggtgcttttgcctgagccggaagggcctaaaacggctacgattgcaccctgttgaatgtctccggtgacatcctgcagcacatcataggtttgtccatcttgtttatagctttttctgactgatctgaaggagatggctggtatgttttgtgtttgatcgtttgcttccattacaataatcacctttcaatataagtaggctgacattatatttaactataacgtgaaacagattccttttggtagcacaaataaaggagaacaggctttcacccattctcctgcagatgctacgcagtcagatttgactgtgctttctttttcggttttctcggctgtgaagcgaaggtatgtaacatcatccccgctattataatgaacaaaccggcaaatgataatagagatgggaaaacgcctgacagcagaacaatttcaccaagcagcgcgaaaatcacttcaccggattgagtggcttcaacagctgcgagtttttgcggattgtctcttaccatatcagtagcccagaaaaataaaaccgtcgcaatgatgcctgagctgacggcaacgataaaggattgaacggtttgacttgctgttggaaggccatctgaccaccagccgtaagctgctaatataagccagaatggaaggcttgccaatgtcattccaagcacgcgctgaaatgtatcaagccggcctccgtattcttcgagcattctcctgtttcctaacggataggcaaaagccgcaatgacaaccggcagcacactgaaaagcagcatcctcccagaaagcgattctgcatgctgaagctgaatcagagccgctccaatcaggatgatcacggaagtgccaagtgaaaccaggggaatcttttggcgaacgagctgcggaccgcccggcatatcttgtttgacataaaacaaaggagataagagcaccccggctacaattgtaatttgccaggttccggctatgagccaccccggaccgtatgcagccgcaaatgtaatcggcgcgtaaaaaagcacgaaaccgacgaagctccatttgatccaataaaacggctttttcctcatctctagtaagagaggcgtgaatgtccctctcatgatgacaatcaaacataaaaatggcaccataaaaataaagcgcagcgaagagctccaaagccagctgcctcctgataactccatcgctctgtttaatataaaggtaacggcgaaaaagagtgaagccaatattccgataacgatagctttcatgatatccctcattctggcattatttttttatactatactattcggtatcatgcagatcaatggaatcatgagaaaaacatcatgtttggcgaactgctatgtgtggaagacaaaaaagggaggtgaaattgatggaaaaagagacacagacatacttctttccggatgacggcaggattccgaatcaccctgattttccgctcgtggtgtatcaaaacgcgcttaaggacactggactggcagagcggatcgtcatccggcatggctggtcaaacagctggtcagggagtgtttttccataccatcattatcacagcaatacgcatgaagtcctgattgcccttaggggagaggctgtgattcagtttgggggagaaaaaggggctgccatccctttcaaatcaggcgacgcagtcgtgattccagccggagtcggacataaaaagctcagctcaagccccgattttactgtccttggcgcctatcccggtggcattcagtatgatatgaagacgggaaagcccaatgagcgagaggaagcggtcaaacagattaagcaggcggcgttgccggcgaatgatccgatcacaggaaaaagagagcctctattggaaatatgggtaaagtgaaggggagaaattgctggattgtcaataactagtgccgcagaaacgatatgacatgtgctccatataaattaatttcataatcgaagcaattcacgttcaaattttgttcaaaaagtgttatcatatagaaggtaatcgaattggagttttttgtgtttgctattttcagagagagtaaaggattttgacttattcaattgtttatttttagataaaaataatactgaatatggcaagatgaaaaactgggtagtaaacatttatttttgtaaatgattgtgcacgaattcacaatccttattcttatgccttaaaagcgtgagacagggagaggcactaccctttccaaaaaaatcagcaaactgcttatagtaaaggagaattggatatgccagaaacaatcgatcaaacaaatgcgtctgtcagccaaagccagcaagatcttattgatcagctattaaagccagaagttcaagaatcattgactgttttagttgaccagcttccgaagctgactgagttagtcaatattttaacgaagtcttatgatttcgctcagtctgtagcgactgacgaagtgttaaaaaacgacacagtcggtgcgatcactgaaattcttgagcctgtaaaagaaacagcgaaagaagtagctgcgactgcgatcgaagcaaaagaccgcgcggaagcaagcaacgaaacaattggtcttttcggcctgctgcgtatgctgaaagatcctcaagctcaaaagttgttccgttttgctaacagctaccttgaagtcatgaacgaacgcgaaaaccaaaaataatctcagattcaaattgatataaaggacggaggatatacgatgtcaaaacatattgtcattctaggcgctggttatggcggagttctttctgctctaacagttcgcaaacattacacaaaagaacaagcacgcgtgacagtggtaaacaaatacccaactcaccaaatcattacggaattacaccgccttgctgcaggcaacgtgtctgaaaaagcggttgcaatgccattagaaaaacttttcaaaggcaaagacattgatcttaaaattgcggaagtaagctctttctctgttgataaaaaagaagttgcgcttgctgacggttctacattaacttacgatgcgcttgttgtaggtcttggttctgtaacggcttacttcggcatcccaggtcttgaagaaaacagcatggtattgaaatctgctgccgatgcgaacaaagtctttcaacatgttgaagatcgtgtgcgcgagtactctaaaacgaaaaacgaagcagatgcaacaatccttatcggcggcggcggcttaacaggtgttgagcttgttggtgagcttgctgacatcatgccgaaccttgcgaaaaaatacggcgtagaccataaagaaatcaaattaaaacttgttgaagcaggtccgaagatccttcctgttcttccggatgatcttatcgagcgtgcgactgcaagccttgaaaaacgcggcgttgagttcttaacaggtcttcctgttacaaatgtagaaggaaacgtaatcgatctgaaagacggatctaaagttgttgccaacacatttgtttggactggcggcgtacagggtaacccattagtcggtgaatcaggtctagaagtgaaccgcggacgcgcgactgtaaatgacttcctgcaatctacatctcatgaagatgtattcgttgctggagacagcgcagtttacttcggtccagacggccgtccatacccgccaactgcacaaatcgcatggcaaatgggtgagctgatcggttacaacctattcgcttacctggaaggcaaaacgcttgaaacattcaagccagtaaactctggtacacttgcaagccttggacgcaaagacgcggttgccatcattggtgctaattctacaccgcttaaaggtcttcctgcttccttgatgaaagaagcaagtaacgtacgttacttaacacacattaaaggacttttcagcctggcttactaatccttttaatgaatctgacattgccaaaagcgttccttaccgagtgctttctggcaatgtctttttttatgtttatgacagcgttaacatttcattttcaaaaaagagattgatcccagaggaatataaaggtaaaataaaaacaaatcaaaatgttaacgttaacattttgaaatagaatgaaagacggtgaggacatggaacccttcatgggcgaaacctttttattgaaaaatgaaaccgctgtcagcctctatcacaattatgcgaaagacatgccaattattgattaccactgccacttaagtccgaaagaaatctatgaaaataagacatttcaaaacatcacggaagcctggctgtatggtgaccattataaatggcgcatcatgagagccaatggaattgaggagacatacattaccggagatgcgcctgatgaggagaaatttatggcttgggcgaaaaccgtgccgatggcgattggcaacccgctctacaactggactcacttagaattgcagcgtttttttggcatttacgagattttaaacgagaagtccgggccggctatatggaaacggacaaatgaactgctcaaaggggaaggcttcggggcaagggatttaatcgtgaaatcaaatgtaaaggttgtgtgcaccacagatgaccctgttgattctcttgaataccatctattattaagagaagacaaagactttcctgtcagcgtgctgcctggatttcggccggataaagggcttgagatcaatcgtgaaggctttcctgagtgggtgcaggcgcttgaagatgccgccgccatatccattgcaacctatgatgagtttttaaaggcgttggaaaaacgagtgcgattcttccactcagccggcggcagagtttctgatcacgcgatagattcaatggtatttgccgaaacaacaaaagaagaagctggacggattttttctgacagattacaaggaacagaggtttcttatgaagatgagaagaaatttaagacatatacgcttcagtttctttgcggtttgtatgcggagctcgattgggcgatgcagtttcatatcaacgctttaagaaacacgaatacaaaaatgatgaaaaggcttggacctgatacaggctatgattcaatgaacgatgaagaaattgccaagcctttatacaagctgctgaactcagttgagatgaagaaccagctgccgaaaacgattttatattcactgaatccaaatgataactatgtcatcgccagcatgatcaacagttttcaggacggtattaccccgggaaaaatacaattcggcacagcctggtggtttaacgatactaaagacgggatgctcgatcaaatgaaagcgttatcaaatgttggccttttcagccgttttatcggcatgctcaccgattccagaagctttctttcgtatacgcgccacgaatatttcaggcggatcgtctgcaatttgattggggaatgggtggaaaacggcgaagtgccgcgcgatatggagcttctgggaagcatcgttcaggggatttgctatgacaatgcgaaacactactttcaatttcaagaagagaaagcaaacgtgtaacaaagtgtccgctcagtatcgctgagcggatcactatccgaaaattcttaagacacagaggtggaacatgcgaactgaactggcaaataaggttgtgtcggtcgaaacggaaaaaaggctttcattgaaagagaaaatgtcctatggttttggtgattttggcaatggttttatgtttgatctcggccagatttatttattgaagtatttcactgatgtagcgggaatccccgctgcgatggccggcggcatttttttagtcagtaagctgtttgcggcgataacagatccaattgtcggctcatcaatcgattatcgcaaaaacatcggcaaacgggggaaattcaggccttatctattaatcggcagcctcgtgcttgcggtgcttactgttcttatttttctgtctcccaatgtatcaacgactggaaaactgatttatgcatatgcatcctatatgatttggggcatcggctattcgtttgtgaatattccgtacggctcattaggggcagcgatgactcaaaattctgaggaacggacctccatttcgacgttccgccaaatcggatcacttggcgccttgtttatcacaagtgttgccgtgatgccgctgctcatcaagtttgataatccgaaggtcggctacccggtggtcatgggcttgttcgccgcactcggtgtgctttggttttatatttgctaccgcaactgcaaagagcgcattgtcatatcggaagcacccaaagaaaaattaacactctcatctgtcgtcaaaacatttattacaaataaaccgctgttaacccttgtcctgatgacgattttttcaatttccgcatacaacattaaatccgccatgctcgtctatttcgcacaatataacctgggcaatgttgaattaatggcttatatgaactttataattatcggttcttcctttttgggcgtcgtattccttccaaagctcgtcaagatgtttggaaagaaacgaacggcaatgatcggcttcggcatcagtgtggccgcggatctgatcaactttatgcttccatctaacgtttatgtgtttacaattctcgccagtatcgcctttattggaatcagtatcccaaatggcatcacgtgggctcttgtctccgatattatcgactatggcgaatggaaatccggtgaacggaaggaagcaacgacatattcacttttcaatttctccagaaagcttgctcaatctttgtctggctttctctcggggatcggtttggggattatcggctatgttccgaatgcagtccagacagcacaggcgctgattggcatcaaagcgctgcttcttctgtatccggccattgctttggcattagcgatgatcattatcagctttctttataaactcacagaccagcagcatgctcagatcgttcaggatcttcatcaaaagaactgacaatataatataaagaatatttaaaataatttgtaaataaaatgtgtttgtaggggtttcgctaggggagtgcccaaaaaactgaaaaggaaggaggcacttgtttgaaaacgataacaattgcagctaaagaagcaaaggaactcgttcggcaaaagctggccagtgccggtttgaatgaacgagatgctgaaaaagtagcagatgttctcgtgcacgctgatttgcgcaatgtacattcgcatggcgtgctgcgcacagaacactatgtaaacaggcttttagcgggagggatcaatcctggggcacagcctgtttttaaagaaacggggcctgtgaccggggtgcttgacggagacgatggtttcggtcatgtgaattgcgacatggcgatggaccatgcaattgacatggcgaagaaaaaaggagtcggcatggtcacggccgtaaacagcagccattgcggagcgctaagctattttgtgcaaaaagcggctgacgaaaagctgatcggaatagcaatgacgcatacagacagtatcgttgtcccgtttggggggaggactccttttttagggacaaatccgattgcttacggtgttccggctaagcataaaaaaccgtttatcctagatatggcgacatccaaagtggcttttgggaagattctgcaggcccgtgaagagggcaaagaaattcctgaaggatggggagtcgatgaaaacggagaagcagtaactgatcctgacaaggtcgtctcactttcaacattcgggggcccgaaaggctatggactatcgattgtggtggatgtattttcaggattgctggcgggcgcggcttttggccctcatattgccaaaatgtacagcggtcttgatcaaaaaagaaagctggggcattacgtttgcgcgatcaatccagccttttttactgactgggatacgtttttagagcagatggatgccatgattgatgaactgcagcaatcaccgccggctgttggattcgaaagagtgtatgtgcccggcgagatcgagcagctgcatgaagaaagaaataagaaaaacggaatttctatcgcccggagcgtgtatgaattcttaaaaagcaggtgagaaaaatgaaagcggttcaagtgcgaaaagcgtatgatctggtgacagtggaggtgaagaagccagttctttcaaaggatgatgaagtgctcgtgaaagtcaagcgagtcggcatttgcggttcagacatgcacatttatcatggaacgaatccgctcgctaccctcccgagagtcatcggacacgaggtaacgggacaagtgaaggaagttggtgcgaaagtacagagcctaaaacccggtgatcatgtggtaattgagccgatttcttattgcggatcgtgctatgcctgccgcaaagggcggccgaatgtttgcgccaagctttctgtatttggcgtacatgaggacggaggcatgcgggaatatattgtgcttccggaaaggcagcttcacgcggtctcaaaggacttgccttgggaggaagcagtcatggccgagccttatacgataggcgcccaggcagtgtggagaggccaggtggaaaaaggtgataccgtcctgatccagggagcggggcccatcgggatctgtgtgttgaaaatggcaaagctggcgggtgctgttgtcatgatgactgacttgaacgatgagcggctggcatttgcgaaagaaaacggcgccgatgctgttgtaaatgtccaagcagaacatgttgccaagcgggtccttgaatggactgggaatgaaggagcaaacgtggtcattgatgctgtttgcctgccggagacttttgcgctttcaattgaggctgtgtcaccggcgggacatgtggttgtgcttggatttgatgaaagagcggctcagatttctcagctgccaattacaaaaaaagaagtcacgataaccggatcgcgattgcagaccaatcagtttccaaaagtggtagagcttttgaatggaggccggttagtgcataacgggctggtgacccatacattttcagttgatgacgttcatcatgcatttcagtttattaaggagcatccagatcaggtgcgaaaagccgtcatcacgtttgattaaatgactgaatccggaggtgcgagcatgaatatgacattccgatggtatggaagaggcaacgatacagtcacacttgaacacgtgaagcaaattcccggtgtcaaaggcatcgtttgggctctccatcaaaagcctgtcggcgacgtgtgggaaaaagaagaaatcagagccgagaccgaatatattcaatcctatggttttcatgctgaagttgtagaaagcgtgaatgttcacgaagcaattaaacttgggaacgaagaacgcggccggtatattgaaaactacaagcaaacgatccgcaaccttgccggatttggcgtgaaagtgatttgctataattttatgccggtttttgactggacacgcacggacatgttccggccgctagaagatggatcgaccgctctgttttttgaaaaggccaaggtggaaagccttgatcctcaagagctgattcggacggtggaggatgcatctgacatgacactgccggggtgggagcccgaaaaattagctcggatcaaagagctttttgctgcctacagaacggtcgatgaagaaaagctatgggacaatttatcattctttttgcaggaaattcttcctgttgctgaggcctatggtgttcaaatggccattcatccggatgacccgccgtggccgattttcggactgccgcgcattatcacaggagaggcaagctataagaaactgcgggcgatatcagattcaccgtctaattgtatcaccctttgtacaggttcaatgggagccaatcccgctaacgacatggtggagatcgctaaaacgtatgccggcatcgctccattttcacatattcgcaatgtgaaaatttatgagaatggcgattttattgaaacatctcatttaacaaaggatggttcgatcaacattcaaggcgtgatggaagaactgcataagcaggattacgaaggatatgtcagaccggatcatgggcgccatctttggggcgagcaatgccgcccgggatatggcttatacgatcgggcacttggcatcatgtatttgaacgggctgtgggacgcttatgaagcaatggcaaaaaaagaggtgggcatatgatcccgctgcatgagaacctggctggtaaaacggctgtcatcactggcggcagcggcgtgctttgctctgcgatggcccgggagctagcccgtcatggcatgaaggtggcgattttgaatcggacggctgaaaaaggccaagcggtcgtgaaggagataacggcggctggcggcacagcgtgcgctgttgctgcggatgtgctggacaggatgtcactggagcgggcaaaggaagacatccttggccaatttggcgctgttgatctgttaattaacggggctggcggcaatcatcctgacgcgataaccgatgtggagacatatgaagaagcgggagaaggccaatccttttttgatatggatgagaggggctttctaactgtattctccaccaacttcaccggtgcgtttctggcctcgcaagtgtttggtaaagaactgctgaaggcggattcacccgcgatcatcaacctttcttccatgagtgcttattcacctatgacgaaggttccggcatacagtgctgcgaaagcatccatcaataattttacgatgtggatggctgttcattttgccgaaaccgggctgcgggtcaatgcgattgccccaggcttctttctgacaaaacaaaatcatgatctgctgatcaaccaagacggaacgttcaccagccgatctcacaaaattattgcgggaacaccgatgaagcgcttcggaaaacccgaggatttgctcggtacgcttctttggctggcggatgaatcctattccggttttgtcactgggatcaccgttcctgtcgatggaggatttatggcttattcaggtgtgtaacgaaagcggtgcaacagaaactgaaccaacataggggtgaggttgagatgttttcaaaagataagcttcccgttatcctttttttgttcctggcaggggtgattaattacctggatcgctcggcgctttccattgcagctccttttattcaggatgatctcacattgtctgccacgcaaatgggcttgattttcagcagtttttcgattggttatgcgatttttaactttcttggtggcgtggcatccgaccgctatggggcaaagctgaccttgtttgtcgcgatggttgtttggtcgctgtttagcggagcagtcgccctcgcttttggttttgtcagtctgctgattatacgcattctcttcggaatgggagaaggcccgctttcggcgaccatcaacaagatggtgaacaactggttcccgccgacccagcgggcgtctgttatcggtgtaaccaacagcggcacgccgctcgggggagccatttccggcccgatagtcggcatgatcgcagtggcgttcagctggaaggtatccttcgttctcattatgattattggattgatatgggcagtgctctggttcaagtttgtcaaagaaaagccgcaagagacgattaaggaagcaccggcaataaaagcagaaacgtctcccggagaaaaaattccgctcaccttttacctgaagcaaaaaacggtcctgttcacggcgttcgcttttttcgcttacaactacatcctcttcttctttttgacgtggtttccgagctatcttgtcgacgagcggggattaagtgttgaatcgatgagtgtcattacggtcatcccgtggattttaggctttatcgggctggctgcggggggatttgtttctgactatgtgtacaaaaaaacggcccgaaaaggtgtgctgttctcgcgcaaggttgtgcttgtcacgtgtttgttttcatcagctgtcctgattggatttgccgggcttgtggcaacgactgcgggggctgtcactcttgtcgctctgtcagtgttctttctttatttgaccggtgctatctattgggctgtcattcaagatgtggttgatcaaaacaatgtcggttctgttggcggcttcatgcatttcctcgccaacacggcaggaattatcggcccggctttaaccggatttattgttgaccaaacaggcacgttttctggagcatttttgcttgccggagggctggctgtcttcgcttcacttgctgtgattcgttttgtccgtccaatcatcggcaagccagcgggaacagaagctaagaatcctgtgtcttattaatctggaaatatagtgggagaggcggtatatttgatgatacaatatacagtaaataatcgcagccggtatgataaggaagggaattagatggtaaccataaaagatatcgcaaaactcgcaaacgtatcccacacaaccgtttccagagcactcaacaacagcccttacatcaaagaacatacgaagaaaaaaatattagagctagcagagcagctcaactatacaccaaatgtaaatgcgaaaagtttggcgatgcaaaagtcgcatacgatcgggcttttctttacaagcattacaaacggaacctcacacagcttctttgcagacacaatcaaaggcgtcaatcaagccataagtgaggattacaatctgtatgtgcgcggcattgatgatctgaaaaactatgactccgttacaccgatgagatatgacggcatcattttaatgagccaaagtgacattgataattcttttatttaccatattcgcgaaaaaaacattccgcttgtcgtgctgaatcgtgatattgatgatcgcaccatcacgaatattttgtctaatgacaaggaaggctctcaagaagctgtagaatacttcattcagtccggacatcaagacatcgccatcatcgaggggatcgaaggctttaaatcctcccagcagcgaaaggaaggctacttatctgcactgattcaacatcatattccgatcaagcatgaatacagtgtcaaaggacagtacgatatggaaagcggctttcaagcgatggagcggctgctggcactgccgaatcctccaaccgctgttttttgttcgaatgatgacatggcaatcggagcgatgaatgcgatattcgcaaagggcctgcgcgtccctgatgatatttcggtgatcgggtttgatgatattggtttttcacagtacatcacgccaaggctttcaacagtaaagcgcccagtggagaaaatcagcgtgcttggcgcgcaaaaactcttgtctctgatcagcaagcccgaaacaaaagcagaaaaaatcttggaaaacacagaatttatggtgcgtgattcagtcaggcgattgacgacgtgatgtcccgtttttcagcgggcattctttatacagaaaaatgttaacgtgtgcataaaaggagagggaggcaatacgggtgcagaagctgaataaaaatgtgtacgatcactatactcagtatccagaaaaaattctccagttcggagaaggaaactttcttcggggatttgtcgattggcagattgatcaattgaatcaacacactgattttaatgggagcgtggcagttgtccagccaagaggctcagaaaaaatcaaacgattaaatcagcaagatggattatatacgctttttttacaaggaatgaaagacggagaagcggtaaacgagcatatgattatcaactcaatcagccgggggattgacctgttttctgattatgaagcatacaaagaattggcatcaagcgaaaggcttcggtttattatctccaacaccactgaggctgggattgtatgtgatgaaaaagatcgtttagaggataggccgcaaaaaacattccctgggaaattaactgcatttctctacttccgctatcaggcttttaaaggagatcagacaaaagggtgtgtcctaatcccatgtgaactgattgagaacaacggcgaaaagctgaaggaaacggttcttcattatgcaggtctgtggaagctggaggaaggatttacacagtggattcatgaggccaatacattttgtaatagtttagtagaccggattgttccgggttttcccgtcgacagcattgatgagatcacggcggatcttggctatcaggatgatttgatagttgtgggagagcaatattatttatgggttatcgaggggcctgattggattggaaaagaacttccctttgcggctgcagggctccatacaaagatcgtcagcgacctcaccccataccggactaaaaaagtaagaattttaaatggcgctcatacagcaatgacgccagtggctttattatacggcttgaagactgttagggatgcagtcgagcatccggaagttgggcgatttataagagagctgattgatgacgaaattcttcctgttttaaaaatggaaggtctttctcagtatgctgacgatgtgctgaaccgttttaaaaacccgtatattaagcattacctggaaagcattgcattgaacgccatttccaaattcaaaacgagaaacctgccgacacttaaggaatatgctgaacaaaagggacagcttcctgaacgcttggtgttttctttcagtgctcttctgtatttttatcataataatgagacattgcaggatgatccggcagttcttcaatttttcaaagaggtttggtgtcaggaggatggcgacatgcttcggattgcatcaagagtgttaggcgaacagtggctgtggggggcagatctcaatgagataccgaagctgactgatagagtcgctgtttacttgaatcatattcatgagctgggcatgcagcgggctcttgaacaatactgcatacaagggggagaggtacgttgaagtcgtttataaagattcataagcaagataatgtccttcttgctctgcgggatatccaaaagggagagaggctgcatgcggacagcgtgtcgattgaagtaaaggatgatataaaaagaggccacaagattgcattgaagcctattaaaaaaaatgacagcatcatcaagtacgggtttccaatcggtcatgcatcacaagatatatcgatcggagagcatattcatgtccataatacgaaaacaaacctgtctgatatccaatcatacagctatacaccgagatttgatgaaaatccgtattctaatgagaaccggacgtttaaaggttttagaagagaaaacggagatgcgggtgtacggaatgaattgtggattgtcccaactgtcggctgtgtcaatggaatagcagaaaaaatgctgcagcgttttgtcagagaaacaggggatattgctccatttgataacgtactggtgttaaagcatcaatacggatgctcgcagcttggcgacgatcatgaaaatacgaagcagattctgctgaatgccattcgccatccaaatgccggcggcgtcttggtgttagggcttggctgtgaaaacaatgagctggcaagaatgaaggaagcactgcaagatgtgaacttgaagcgggtgaagtttctggaatcccagtcggtgaccgacgaaatggaggcaggcgttgctttgctgaaggaaattcatgaagcggccaaagaagataagagagaagacattccactgtctgaactgaagatcgggctgaaatgcggaggttcggacggtttttccggcataaccgcaaacccgctgcttggacgtttttcagattatctcattgcacagggagggagcacggtgctgacggaagttccggaaatgttcggcgcagaaaccatcctgatgcagcgggctgccaatgaagaagtgtttcataagatagtccaattaatcaatgattttaaacaatattttatcaaacatgatcagccggtgtacgaaaatccttcaccgggcaacaaagcgggcggcatttctacacttgaggataaatcgctgggctgtacgcaaaaagcggggatttctcttgtcacggatgtcttgaaatacggggaagtgctcaagacaagagggctgacgcttttgagcgcgccgggcaatgatttgatcgcctcctccgcattggcggctgccggctgccaaattgtcctctttacaacgggaagaggcacgccgtttggcacctttgtcccgacggtgaaagtagcgacaaacaccgagctgtatgaggcgaagccgcattggattgattttaacgcaggtcttttagcagaggatgatgttcatgaggaatatgtgctgcgtgagtttatccactatatgattgaggtggcaagcggccagcttgtgaaccatgaaaaaaatgatttcagagaacttgccatttttaaatcgggtgtgacgctataataagaaaaggctatccttcaagcggatagccttcttcattaaatcaattttaaaccgctgactaaaataatggacgccataataaattgcagcggacgcggggagaatcgaggcgaaagatggctcccgatcagcacgccgggaattgaaccgaggagcagattagctgccagcatgtaatccacgcttccgaagcttgcgttcaaaatgcctgctgccgtaacaagaagaaaagcatgcgcgatatcggttccgacaatctgtgacgctttcatgttaaataagtaaatcatggcaattgcaaataatgagccagaaccgattgatgttaatccgacgataaacccaaacacaacaccaataagaattgtcagcgccctcttattttcaagcggcatcagctgccagcggttggggcgaagttttctatccaaaaacaaacgaacgatgattgaaatggcaaccagcgttaacacatatcctagagcgtgcttaataatttcttcctgatgctggtgaaaggcggggaacaaatgcaatatgccaatggctagcgaagcactcggaatactgccgatggctaagtattttaccaatttaaagttaatcgttttctgccgccaatgggaggcaacgccaaacagctttgtgatcgagttatatacaagatccgtaccgaccgcgatggaaggattaattccaagcacaattaaaaggggagttaataaggccgctccacccactcccgtcaatccgactaaggctccgacaaacaaacccatcaatatgatgcttacactcatgataaaggcctcctgaaaacccgactatttttatcagattatatatgattaggacgcgttaatcaattaaattttttgaatttttgcacgttagctgcttgaaattttggtatgctcaatatctctattcatttgccctataatgagtgtctggacgaaatcgagaagtactaaaggcgcaaaaaaaagatacctcttaacaggtatcttttttcttgtttacgctacatgcgctgctgatagaaaggaagctcagtgtggcccatttcccgcacatacacgaacaggttgcctttatggtgaatttcatgctccattgcaagctgaagcagcgcgcggcctgtgacttttctgccgaaagcggatgtcagatcaatttctctgtccagctgctcttcagtcagctgttcaaggatagcggccgttttttctgtatatgtttttgccagaacattgagatctgtttctgtttcctcctgcttgttttgaaatggtgaggcattgccttccttaatgacatttgcgaacaagtggaaagacgtaagaatgtgtttgaccagttcttctgctgacattgatgtttctgccggtttgtagctgtaatggtctttgctgattttttcggcaagctcattggtcacgtttcgatgggataaaaaatggctgacaatttgattggattggctcattatgatctcctccatatgtaaaaataaatggtgcaatgaaatcctatatcaacggttatgaattcacaagtaatatgctgtgggatgaaacaaaatgctatgtcaatcgtatatataacgttcacaaaacatgaaatggagtataaacatgactaacatacctttcatttatcagtacgaagaaaaagagaatgaaagagctgcggcgggctacggcactttcggttaccttatcacacggattgaagaaacgctttatgatcaatacggtgtattctatgagctctatgccagtgatgatccaaatacggaatactgggagcttcttgtagaagatgtccgcagcggttcattggagcctgagcatgtggcatatatatttgaaaagcttgaaaagaaaacctttgcttacgatgaagatgagaaagaaccggattataccgtccataagtctataagaaacagtgtatacgcgtatcctgaaaagggagttgcttttgccagaattccatattttcaagatgggagcattatgagttttgattgtctgtttgcggttaacgatgaaaagatgcgtgcatttctggagggagtcagaccgcgtctttgggaaaaaagcaagcggaaagtgaccgtgtttacggatggagatggagggacttcaagagagcaggaagccattgtcagagaggttcagcggagtcaagtcatcatgaatccgctattgaaaaaagagatatacagatcaattgatcagttttttcatagtgataaatcgttttatcaaacatatgacatcccttacaagcgcggcattctgttatatggacctcctggaaacggaaagacgacgttagtgaagtcgatcgcaggcagtatcgatgcacctgttgcttattggcaaattactgaatttacgtcgagcgagacaatagaagaagtctttcaggcagcgagacgcctcgctcctgcagttctggtcatcgaggatatagattcgatgccggaagatgtgcggtccttttttctcaatacgctggacggcgcgacatcaaaagaggggctatttctcatcggtacgacaaactatcccgaagagatcgatccaggtttgatgaatcgtgcagggcgatttgatcgtgcctatgaaatcgggcttccggatgaagagctgcggctggaatatatgaaaatgagaggctttggcatctttttgagtgaaggagaaataaaaaacgccgcaaaacttacagaaggcttttcctttgcacagctgggagaattatatgtatcttcagcccttcaatggcaccaagaagggaatcaccatattgaaaccatggtgaaagacatgacaggagagcaaagaaaaagccagcggggaagctggatggaaagaaacaaagtcggttttcactaaaagaaagcacgggtgtttgaaaaacccgtgcttttttgttgcggttagccgaaattcgacaattgcggttattttgcgttcttctttttcttgcaaatatgataaaatatgacatatctcgggtaattcaaaaaggggggattaattgaggatgaagcagacgattccgtcctcttatgtcgggcttaaaattaatgaatggtatactcatatccggcagttccacgtcgctgaagccgaacgggtcaagctcgaagtagaaagagaaattgaggatatggaagaagaccaagatttgctgctgtattattctttaatggagttcaggcaccgtgtcatgctggattacattaagccttttgaagaggacacgtcgcagctagagttttcagaattgttagaagacatcgaagggaatcagtacaagctgacagggcttctcgaatattactttaacttttttcgaggaatgtatgaatttaagcagaagatgtttgtcagtgccatgatgtattataaacgggcagaaaagaatcttgccctcgtctcggatgatattgagaaagcagagtttgcttttaaaatggctgagattttttacaatttaaaacaaacctatgtttcgatgagctacgccgttcaggcattagaaacataccaaatgtatgaaacgtacaccgtccgcagaatccaatgtgaattcgttattgcaggtaattatgatgatatgcagtatccagaaagagcattgccccacttagaactggctttagatcttgcaaagaaagaaggcaatccccgcttgatcagttctgccctatataatctcggaaactgctatgagaaaatgggtgaactgcaaaaggcagccgaatactttgagaaatctgtttctatttgcaagtcggaaaagttcgataatcttccgcattctatctactctttaacacaagttctgtataaacaaaaaaatgacgccgaagcgcaaaaaaagtatcgtgaaggattggaaatcgcccgtcaatacagtgatgaattatttgtggagctttttcaatttttacatgcgttatacggaaaaaacattgacacagaatcggtctcacacacctttcaatttcttgaagaacatatgctgtatccttatattgaagagctggcgcatgatgctgcccaattctatatagaaaacggacagcccgaaaaagcactttcattttatgagaaaatggtgcacgcacaaaaacaaatccagagaggagattgtttatatgaaatctaaatggatgtcaggtttgttgctcgttgcgatcgggttcagctttactcaggtgatggttcatgcaggtgaaacagcaaacacagaagggaaaacatttcatattgcggcacgcaatcaaacatgatgcataaaaaaagacccttaggggtcttttttatttcttcagcttccattcttttatcgtcagctcagaagatccacttgccaccagcggatccgcatggccgatttccgctgcctcttccagtgaatctgcttcgatgacatacgctccgcctgtggcgtcgctgaatggcccaaacatttttaaacgtttttctgcctgtaaacgatccagaaattcatagtgcccagccacatgctcctgattaaatttctccgttctcattgtcagcattaaatatgtatacatattcagaccctccgtgaacttcagtttaacacatttatccatattacagtgatagatgatatgagcttttcgtcctacgaatgccacctatttatgaaaaaagaaaaggagagatgataggtgagcattccagtaaagaaaaatttggtttctgaggcgaaatacgcgttgaagtgtcctaatgcaatgtccgctgaatacattaccattcacaacacggcaaacgatgcgtcagcggccaatgaaatcagctatatgatcgggaacacaagctcgacaagctttcattttgcagtcgatgatcaagaggtgattcaaggtctgccgcttaaccgaaacgcctggcacacaggtgacggcacaaacggtccgggaaaccgcaaatcaattggcgttgagatttgctacagcaaatcgggaggcccgaagtatgaggcagctgaagccttggcgatttcatttgtagcacagcttttgaaggagcgcggctggggcatcgatcgggtgagaaagcaccaggactggaacggaaagtattgcccgcaccgcattttatcagaggggcgctgggatcaagtgaaggcggcaattgaaaaggaattaaacgggggcgtatcagctaaaaaagctgcagtctcttcttcagcgtctgaatatcatgtgaaaaaaggcgacacattgtcagggattgccgcatcacacggagtcagtgtgaaaacgctgcaaagcatcaatcatattactgacccgaattacattaaagtcggacaagtgatcaaactgcctcagacggcatctgcttctaaaagccatgccgcatcctcatatccgctcccatcaggcgtgatcaaagtgacaagcccgctgacgaaagggacaaaagtaaagcaggtgcagaccgctttagccgctctttatttttatcctgataaaggagcgaaaaatcacggcgttgacggcgtttatggcccgaaaacagcaaatgcagtgaaacgttttcagtctgtcagcggtttaacggctgatgggatttacggtccgaaaacgaaagcgaaaatggaggaaaagctgtaaataaaaagacggaagctgtgaagcttccgtctttttatcttacatacaaactgcggcaagcaccttttgaatatcataaatgctctcatcttttttaaactgctttgagacggcaggaagttctgcgccggaaatccaaattttcagttctgaatcgaggtcaaagcggccggccgtttccacgctgaatctggaaatgcttttgtacggaatcgattgaaattccgttttcttgcctgtgattccctgtttatctacaaggataagccgcttgtcagtaaagacaatcaaatcgcgaaccagcttaaacgcggcttcaacattctcaccctccagcaaaatatgggcaagctcttctttcacagcagccgttgacagtgttgacgcattgccgagtaatccatcaataaaccccatcatatacctcctcttcgtattctatcaaatcatactataaaaaaggttttcattcatggatgagtagagtaaacttgtgctgactggtaaagggggcgttcaaaatggaagatatgtatgacagctttgcagccctttctgcttctgagtcggagtatcggattatttatgaggagaaaaacggaagtgagcttattgtcctcggtcctcacggcggcagaattgagcctggcgtcagtgaactggtgcgggcattttcggatcgatgttccatctatttgtttgagggtctaaagcagcgaaacaaccgttccttgcatctcactagcattcgttttgatgagccgctggctttagaaaaagtgaatgaccaccattacgcattagcgtttcacgggtattatgatccgaaaatcccgcatacattggtcggggggcggatcgtaaaaaagccaagctcatttgtgagcgtctgaatgaagcgggttttagcgccgagctcaccaatgagaaagaccgcctggcaggtgtacacccaaacaatattgtcaatcggacgaaaagagaaatgggactgcaattggaggtaagcacggcacagcgaaatgcgctattccgcaattttgggtgccgtgataaaagctacatacaaaacgatttgtttgatcgatatgtggaagccgtcaagcttggcttttataaataaaactagacgggacctgcacggtcggcctattccttcatacgctggggttgtgcgaaagtgtggggaggaatgattcatgttttatcatataaaagagcttcaatatcaagcaaagccagctcatcctgatccggtttatgcgaaaaaacttcaagaggtgctcggcggccaattcggtgaaattagcgtcatgatgcagtatttgtttcaagggtttaactgcagggcggatactaagtatagagatttgttatatgatgtggggaccgaagagattgggcacgtagaaatgctggcaacgatgatttccagacttctggacaatgcacccgcggatgtacaggaggatgcttataaaagcaatcccgctattgcagcagtcatgtcagggatgaatcctcagcacgcgattgtgtccggattgggggcgatggcatcagatagtgagggctatccgtggaatgcaaaatacattatctcaagcggaaacttgctggccgattttcgcgctaacttaaatgcggaggcccaaggacgccttcaggtgacacggctttatgccatgaccgatgatccaggggtaagagatatgctgtcatttttgattgcaagggatacctatcatcaaaatatgtggtatgcggccattaaagagctggaggaaagagaacgggatattgtcgtcccgacgacgtttccgcgtgagctcgaaaaacaggaagtctcctatgacctgtttaatttttccaggggggatgaaagctcacaaggaagatgggcacatggggaagcctttgacggccggggtgaattcaggtatatcccggctccgattgcgttcgcatctgcgcctcatcttaaaccggcgcccatgtggctgcataatacagttcccccaatgtcgaaatgttaggttctcttctgggctgaggaatatatcctcagcccttatttgatcagatgtttttgccaatatgatataacgctttttcctcagcgacctgcaagtgctgttgatcgccttcctcgtacgcatgtggccgcttgtgagataataaataagcgagccgcttctgaaattgaatacctgctttacgccgttcaaacatgtcaagccttttatcagcaaattcctttgttacccggaataccgccgaaattgtggcgagtgcctggcttctccattgcggcagttccatctgcaacagcataaaggttggcacacagaagtggtacataaattgatttgcctggaattcttgaagctctctgaagagcttgttcatctgaaaatgattgcctgcatgctttaacacgtggcacagctcatggccaaaatcctcccattgctcttcccgtgactttttttggtttaatacgatactatacatgccgtcgtatttcaccatcatgctccccatatcctcaaaatgcacccgaatatccagatcctttgcgattttcagcatgtcaatgtgatgaggggatgtgatgcccagccggccgtataaatttttaacgtattcctccagatgtgataagtaatcgcccaattgaatactccctttcgaacatttgttctatttttagcgagaaagaaaagcccgtataggactggaaagtagcgtagaaatctttcccttttctttaaaaaataaacacttttttctttatatcggtctactttttatatgttttagagaacagagaacgatttatttatttttcggtttgcggtttttctctttttcttttaaatagttgataaattcgatggcctgctgtttgctttctggggaaaaatcctgcatatcgcggtatgcaagctgcaggtccggatctgagaacatatcgtcatcggattttttgtctttccccgttaataagtaatcagtcgttacttgaaagtaatcagccagcttttggagtgtgtcgtaatcaggttcgcttcgcccattttcatagtgggaatatcgtgcccgtgacacaccgatgtgtgatgcgatctcttcctgtgtccttttccctctgagactcttcaatctgccgcctatcatactatgacctctcttttttaaactccctacgttacttatgattatagatacaaaatgtatcaaaataaagttatgataaaaaaagtatcaaaaataacttgatgatacagattgtatcgtttatacttggtaacatccgatacaaaatgtatcaaaaaagatcaggagagtgatcacatgtatccgatccaaatcgtttttagtgaaaatcccatagatcagcgccatctcggacaatccggcggcaccatttcgtttaccgcatgcggccttccggtgtttcactttgaaacgcaggaacagtttcaagcatacatgatgttaaaaggagaagcggcgtacaatgaaaaacgataaaagctatccttttccgacgtattcagggttattgaattcagaacattatgacaaaattggcccggcgttatggctgtttctctggtttatcagctcaacaacaaaagaaatcgaaaaagacggcgtaagctggggcatcgtactcggccataagccgttaaaagcgagagaaatggcggcagtcttcggcgtaagtgaaaaaaccgtcagaagatggctggagcttctcgaaaaccatgattacataaaggccgtccgtgcgccatacggactgatgatttcggtcaagcattccaaaaaattcagcttcagatcggacaatactgtacacgggagtctaaaagaacggccattttcgccgcagacaccggacacaaacgaccgtacagatatagataaaacaaacaaatatactgctgctgatgatgcagtggatcacattgcgaagcggtttacacaattacggtcggctcaagaaggacgcaccgtgtatccttcctcaagagattatcaagccatcgcccgcattgttgccattggcgttcctgtcacgcaaacaatcaaatggcttgaagaatgctttcaggcttttgaaaaccggcggaccgccgcttctgaaacaatcaaggcttttcgctactgctcgaaattcattgaagatcgatttttcgcgcagcaagccaaaaagaatgccgcaattcagcatgagaggatgaaaaaacatgacaaaacgaacaatcgaacagattttggacgagctgagaagagggagacgtccattactggcggacaaaccggccgaatcagacgcaagcaggtatgattgcctgcgctgcaaggatcagggaggttatctcgtcagacagaatggcctggaagtctggacgatgtgcagctgcatggcagaacgaaaagtgaagcggctgctgggtgcaagtgagattacccacgctttcagacagctcggcttcaaggaattccgcacggagggaaagccgcaggccataaaagacgcattggagtgtacaaaagagtatgttgccgattatgaacaaatcaaggattgccgaaaaaacagcattgcccttttaggacagcccggatcagggaaaacacaccttttgaccgccgcagccaacgaattaatgagaacatgctatgtgcctgtcatttattttccgttcgtggaaggctttactgatctgaaaaatgattttgccctattagaagcgaagctgaaccggatgaagcaggcggatgtgctgttcattgatgatctgtttaaaccggttaacggcaaaccccgcgctacagattggcaattagagcaaatgtattcggtactcaattatcgttacttaaatcataaaccgattttgctttcaagcgagctgacaattgaagcacttgtacgggtcgatgaagcgctcggcacgagaatctatgagatgtgcagtgactatttagtgattatcaaaggagcagcctacgagcttaaccatagattggagggcgtcagataatgtgcaagctttgtcaaacaaagaaagtcattgtggaacataccggtattggggtcgtttttcatccatgtccgaactgtcggtccggtactgacttaacgcctgtcattcaaaagctggagcaaatgctgacagcgggaaaagcgaggctgaatatctatgattaaacagctgactgcactaatcgctttgctgtttcgggcaaagcgaacagaaaaaaacattgaacaatggtataaggacgacgggaagtgaaagtgttggaaaaaacaaaacagacagagaaaagccctgcgccgtggcgtgctgtcccgtgcggggatacgaaaccgatctatatttattcagcttacagtgaagaagaaaaagaaagattcccatattcaaacggacggctgattgccgctgtatttgaccttagctcttattcgcaaaaaagcaatgccgctttgatggccgctgcgcctgaattgctggaagcgtctaaagcagcgcttgattttctgaaagggaattctgttcattcaaaggagcgcatcattcagctattagaaaaagctgaagcaagcgctgcaccgaaaaggggaggaaataaaacatgattcatcctaaaaaactgctgcatatcgattccgtcacgcttaagagccagctggaggacgggaaaatccgtgtcattattgtggatggcatcaagcaagaagcatggatcacagaagcgcccgagcatggaaaaacgctcgtcgaaacaagaaagggcgaccttgcccgagtggaatttgaaatcggctacaaattaaattaaagcgaaaacagaatacgtccaagacggaaagcctgcggacactgatcaactgcacagcatttgtgcgttgattggtgtccgttttttatttgccaaaaatgaggaggatcatagaatgcaagacttactatttgaatataaacgaacgctcaaacaaacaagaaaccaatataaaccgctcgctgaggcagatgaatccgtgctctcagctgaagagctgaaggataaaaaaatcatcagaaatatgattactgatcttgaatatgtaacagaatggcttgaaaaaggaaggcagcccggcatcagacgggcgattgaccggcgtgatgcttaccagcggctgatgatcaaggacccgagaatcatcgaatcattttccagcgctatgatgtttgagccggacggacaggtatcagaagaagacagagatagaattcgagaagcattagccctgttaacggacagagaaaaggaaatgtttttgctgcataaggtagaatgtttttcttatgaacggatcgccgatcttctcggcgtaaaaaaatcgacagtgcaaacgacgattaaacgggcgagtttaaagatgcaaagacagcaggaagacatgaatcgatcacttgcctgaaagcttgtcatacgtttgccacctataagtgaatagagcatgacacataagcggctggctgatcagccgcttttatgaataaacaaccatgctggaggtggcggtgatgccgtagcatgaaaacacaacttcgcgaacaagcattagcaatctatcaacaacatcaaggaaagatcacaaatcgggcgatcgcggacacaatcggtgtttccccgaaaacaatcggcatctggaaaaaacaagacaaatggaaagaggccctgttttctgcgtccaaaaacgaacaaaaacagcgccctatagacaacgatgaattaaatgaacgccagcggctgttttgcctgtattacgtcaaaagcttcaatgccacacagtcagcaatcaaagcgggctattctccggacagcgctcatgtgacgggcagccggctcttaaaaaacgaaaaggtcgctgctgaaatcagacgcataaaaaaagaaatggtcaatgaaatgtttattgaagcgatggacgtgctgcaggtttatatcaagatcgcgtttgcggatattacggactatgtgaccttcggaaaaaaagaggtccaggctgtcgggaaatcgggtccgctgtttgatgaagatgataatccgattatgaaggaaatcagctttgtcgatgtcaaagactccgggctcgttgatggcaccattgtaacggaagcaaagcttgggaaagaaggcattgccatcaagcttgcagataaaatgaaggcgcttgagaagctatccttatattttgatttgtttccagatcaatttaaacaaaaaattgaaaatgagaagttgaagcttgccaaacaaaaagcggagaaaacagatgacagccaagagccgattgaaattatgatcaaacgaaaagagggcaagtcatgattgtaaaagaaatcaaccctcatttcgaagattacgtgttcaattgggagcagacgtaccaatttctcgtcggcggctacggctcatccaaaagctatcataccgcattgaaaatcgtgctaaagctgctgaaggaaaaacggacggcccttgtgatccgggaggtgttcgatacccatcgggattcgaccttcgccttgtttcaagaggtgatcgaagagctcggtctcacaaaggctgtggcatctctttcttccccgctgcagctgcgatttcacaatggcagccggatcatgttcaaaggaatggacaatccggcaaaattaaaatcggttcataatatttcattaatatggattgaagagtgctcagaggtgaagtatgaggggttcaaggaattaatcggacgtcttcgccatcctgagctgaagcttcatatgatctgtaccaccaatcccgtcggcacctccaattggacgtacaggcatttttttcgggacgaacgcaataaacggtttgtgctggatgacagcgaactttacgaaaagcggacaattgtgaagggagatacgtattaccatcattccaccgctaacgacaatctttttctcccagaaagctatgtgaaacagcttgacgggctcaaagaatatgatcccgacctgtaccggattgcccgcaaaggaagattcggcgtcaacgggatcagggtgctgccgcagttcgaggtactcccgcatgatcaagtaaaaaaatgtatcgcagccatcagcaagccaatctttcgtacaggtatggattttggattcgaggaatcctataatgccgtcgtccggcttgctgtagatcctgaaaaaaaatacctctacatttattgggagtattatcaaaataaaatgacagatgataggacggctgaggagctgcgtgagtttattgagacacaggaattgatcaaagccgactcggctgagccgaaaagcatccaatatttccgccagcagggctttcggatggttggagccagaaagtttcccggctccaggcttcaatataccaaaaaggtaaaacggttcaaaaaaatcttctgttcggaccgctgtgaaaatgtcatctatgagctcaagacacttacgtatgccaaagataaaaacggagctctgattgaggatgaattcacgattgacccgcatacgctttctgccatttggtatgcgcttgatgattatgaggttgctgatatgaaagagacagcacacaaacgaatccggccgaaccgagaaaggaggaggtcataaatcatgcacaatcaaacagtcagagcaactgtatttaaagccaatgccgaggctcctcagacaaagcaaatctatgaggatgacttttctgagctgtacggagaggacattatcgctccgccctacaatatcatcgagctcaaaaccattgccgaatactcgaccattcttcagcaatgcattgatgcgtacagagtgaatattacaggctttggattcgatgttgagtacacatttgatgtcaacgcaagtgatgtcgatcaggcaaaaaagaaaagagcggaaaaagactgggccagactcgaagccttttataaatgtcttcactttgatgaatcagctgaaatgattttaggctatgccatcgaagacagagaaaaaacaggcaacggatttatggaagtgcttcgcgacggggcgggaaaacctgccggcatcgaatatttagatgtgaaatatatgcgtgtatgcggagcaggcgagcctgtagaggtttcatttgtatatgaagaaaacgggaaaatgaaaaggatcaaaaggcaaaaacgcttccgaaaatatgtgcagatgatcaatggaaagaaagtattttttaaagaatacggcgatccgcgaaaaatggatattcgcacaggtgaatatgtaaacacattggcagagaagtatcaagcaaatgaagccattcacctcaaaatcggaagcggcgtatacggtgtaccccgctggatcggcaatattgtcaatttatacggggcccgaaaagcagaagagctcaattttatgtattttaagcaggggcgtcacgtccccgctgcgattacagtggaaaacgggatgctgtctgaagcttcttaccgggagctgcaggaatacatgaatgatcttgaaggcgtggagaacgcccataaatttctcctgatcgaagcggaaggaatcgcaaaagaaaaggatctccacggaggcgaggatattacgccggtttccgtggaaatcaaatccttggcggaaattctccaaaacgacgccctgtttcttgaatacgatgaaaaaagcagaaataagctgcgttccgcgttccgcctcccgccgctgtatacaggcgaggcccaggaatacaaccgggcgacagctgatactgctagaaaaattacggaggagcaggtttttcagccggagcgaaaaacgctcgtgaataaactgaacacgctgcttttgccggagctgaatatccatgacgtcaggctgacattaaaaggaccggactttcgtgatccgcttgagattgcgaaggtgctcggtccttttattacagccggagcagtctcaccgaatgatttacgtgaccttgccggacgggtgcttggaaaaacactggaggagtggccggaggacatttataaacggcctgcaggacaggatgcggaaaagacaaacctgactgcgctcatgcaggagttgaaagaaagcatcgaagatatcaaaacgtcctgaagggaggtgaatcaagcaggtggcgcgagaattaagaaatgccaaaatcagctttgtcagttatgtggacaaggcggctaaccagacagaatttttctttacgaagtcagccaaacctccgtcatttgaaaaaaaggttcggctgtttacaaaaagtgagcaggatgaacaaaagctcgtgtacggaatcgtgtatgagcctgatgttcctgatgcccacggcgattttatgaccgccgaggaaattgaaaaagcggcgcacggttttctcgcggaggcacgggagattgatatcaatcacagcttcgagggcggaaccggcgtcgtggtcgagtcctatgtggcgcccgatgattttatgatcgggtcaaagcggattacaaagggctcatgggtgctcgtgacaagagcgtcagacgaggtgtgggaacagatcaaggctggaatcatcaccggctacagcatggcgggcactgcagatgtatatgaggaagaaccggttgaaaaagcgggattcttcagtgtattcaagcaaatgcttgctgacaaaacagggaaggagactgaagaaatgagaaaagaagacatgaaagaatcattcgagcatgcgctttaccctctgctcaaacggcttgagcggattgaaaaaaacacagacacggaggaaaagccggagcagacgggtgatgacgagcgtctgaaaaagctcgttgaagacatgcttgccccgctgatcgaacgcatcgaggctttggaaaaagcgcgaggcgcgtctaagcagacagcggacgatacgggcggcaatacagagcaagtcaaaaaatcaatctggagcggactgctgtaaaaccagtcaaggaggaggaaatcaattgagaaatcaagagatcattcggaaagcggaaatgtcgctttctgctttaaaaagcggcgggcttatgaaccctgcgcaagcatcggcttttatccgcatggtgcaaaacacgccgaccattttcagtgaatcccgcgtgattcaaatggaaaatgactcgcaaaaatttgagaaaatcggcttcggccagcgtattctgcgggctgcgcaagaaggaaaagcactgtcaaacgacgagctgacagttccaacgacaagcactgtccagctgaacacgaaggaagtcattgcggaaatcaacattacgtatgacacacttgaaaacaatattgaaaaagacggcctgcagcagacgatcatgcaaattttagcagagcgcgcagcagttgatattgaagagctgatcgttaacggcgatacagcatcagctgatccgtatctggcacagctggacggcatccgcaaacaggcggtttcccatatcgttgacatgaacggtgaagaactgtccagagcgacatttaagaaaggcttaaaggcagttccgccaaaatatttgcgcatccctcaggaattcagattctatacgtctcacggcttagaagttgaatggaaggaccgcgtggcagaccgccagacaaaccttggggaccaggctgttcagggcggcttgtcaacagcattcggcgtaccggtcaaaggagtatccaatattcagccgtacacagtcggtgagggagacgcgcaatatgacgcttctgatatcattctcacacatccgaaaaatatcattctcggcttctcccgcaatatccgaattgaagtcgacaaagacatccgctcccgtaaatttattattgtcttaacggccaagctggacagcaagttcgaggaagaggatgcctgcgcaaaattaattaacgtaaaagaataatagaaacgaggtggtcagctcatgctcattgaaccgactgacgtagcctcctattcggtctatgatcgggtgaaaaacaggccggaagagctgctggcgcaggatatcatcgaggcggaagcagaagcggctctcatcacgggccaccgctttgaagacagcttgtatgatccgctgcccggcaaggtgaagttggctttagtaaagcttgcccagtattttgcgcttgtcaacagcgatgaatctgcctcatcaagctatcagtctgagaaaatgggggattattcctacacggtttccggagaaggcggcattcagcggccagaggtatatcatttgctcgaggagtttatcacgccgggctacgcccctgaatcctccagactgaaggtgaggtctttatgagctacaggcagatgctcattcatcgctgcgacatttatcatgaagcagcgcaagcgccgtctgcaggccgatttgggattccggcagacaggctgcagccggtgatttcatatccggatacacccgatgaacaagatgtcccttgttattttaccgaaaaaacgcagcagctgattcaggaggagccggatcaaactgtatatcatagctttctcgtccattttccgttgtcagcggacatccgcgtgaacgataaaatcatttgggagaatcataaatatatactaaagctgccgaaaaggatcagacatcatcattgggaggtcgtcgcagtcagggatgaaagcctatgaaaatagcgggattgaaacagctgaacacggcattaaaagaagcggcttcaggcggtttttccagacaggcgtcccggtggcttgaggagtgcgggcaagattttctggagatcgtcaaatctgaactcatcagcacacaaacgattgatacagaaaaactgctcagttcctttgagaaaggcgcagaggacaatctctggattgtgcaaagcggcgggctttcgcttgaggtggggacacagcttgattacgcctcatttcttaatgacggccattggacgtcaaaacaagatgtgagatgggtgccggggcgttttcaaggctcacggtttatttatgatccagccgcttcaacgggaatggcgctcaagagaaaatggataccgggcacgggctactgggatcatgcactgcttttatatgaacagctgtttgaaaaatcgctggaaagcaaactgcgccagtggctgaagaagctgtaaaggaggagcaggatgaacagtgaaacaggatcgatcatggcgtttttgtacagccggtggtctgttcccatttatgaacgcgagcttcctgatcactttcaggtgccgtcgttatacgtcccgccaccatctgttttcgaggaaacagatacggtctccacatttaaaaaaacctacagtctcaatgtaaaactgtttcatctggactccgttcaggcgctggatgaagcggacaggctcgcggatgccatcagagaagcgagaaatatgattccgctgctgagtgaatccggcgagaagacgggggatatggttcgcatctcccaaatcgagacaagggtaggggacaggggcgaggcggccatggtgatcaggtggagcagccgatattattatcacaaaacagaacagcctgtcttacaggatatcgacatgaacagcggggtgaaataaacggtgtcaaaggacaaacaacagaagaaggctgtacatacaaagagccgggaagctctatttgatacagcggatttgattaagcacgcgaaggaactgttcggcgttaagccggatattcttcagggggctttatttggcgtggatcaaccacgtatgacgaaatcagaagccaaccaattgattcaaacatttctaaccaaggaggtcatgtcatcatgaatggcggaacatttacaacaggcaaagaaaaagaacgtgcaggtatttattttaactttaaaacgacggcacaggagcgggtatcactcagtgaacggggaacagtcgcacttccggtcgcatcaagctggggcgaagcgaaaacgttcgtctccatttccagcgttgaagacctaaacaaaaaagtgggcctcagcattgatgacccgtctttattgctgctgcgtgaagcgaagaaaaatgcgaaaacggtattgatgtaccgtctaaccgaaggtgtccgagcgtctgctgatattgctgaaggcgtcaaagcaactgcagtatatggcggaacaaaaggaaatgacattatcatccgcatcaatcaaaatgtgctggatgctaattctttcgatgtgacaacatatatggacgaatcagaggttgataaacagactgtcaaaaaggctgaagaattaacagctaacggctatgtcacttttaccggaacaggcgatctttcttcaacgattcctctcactggatcagaaggagacactgcagctgagacgctgaatgcatccgcgggaatccgtttatctggcggtacggataaagcccctgtcaactccgactatacagatttcttagccgcggctgaaacggagagctttgatgtgattgcgctgcctgttgcagaaggtgaccagttgaaggcgacgtttgctgctttcattaaacgcctgcgcgacggccaaggacaaaaagtgcaaggcgtcacagccaattatgccggtgattatgaaggcatcatcaacgtaaccgagggtgtgctgcttgaagatggcacggaagttacaccggacaaagcaacagcttgggtagctggagcgagtgcaggagcaacctttaaccaatcactcacatttgtagagtacgaaggcgccgttgatgtgttacaccgccttgaccacgatacgattgttgaacgtctgggcaaaggtgaatttttattcacattcgacgcccgtgacaaatccgtcagcgtagaaaaggacattaactcactcgtgacgttcacagctgagaaaaacaagaaatttgcgaagaacaaaatcgttcgtgtcctggatgctgtgaataatgatttaacacgcgagctgaaagccttaattaaatcaagaaaaggcagcggaagcgatatcccggcatctgaagacggactgcagtatgtaaaaacgatgatcacgcaatacatgacaacacttcaggatgcaggcggcatcactggctttgattccgatgaagatatcacaatttcaatgaatgaagatcgtgacggcttcttgattgacctggctgtacagcctgtcgacgcagcagaaaaattctactttaatgtggaggtaaactaatatggcattaaaagcacaaaacacaatctcaggaaaagaaggccgcttatttctcgatggtgaggaaatggcgcacatcaaaacatttgaagcaaacgttgagaaaaacaaatccgaagtcaacattatgggccgccgcatgacaggccataaaacaacaggggcaaatggaacagggaccgcaacgttctacaaagtcacatcaaaattcgtgctattgatgatggactatgtcaaaaaaggcagcgacccttatttcacgctccaagctgtgctggatgatcaatcctcaggccggggcacagagcgagttacgctgtacgacgtcaactttgactctgccaaaatcgcaagccttgatgtcgattcagaagcgttagaggaagaagttccatttacattcgaagacttcgacgtccctgaaaagctatctgacacgttttaatcaaagctgaatcagcccatacgtagacctttctcagaaaggtctgttttttaaagatgaaaccaaacaatagacaagggagttttttacatgagcgagaagaacgaaaacgtatatgatctttccttttttatgccgggaaaaacaattgaagctgaggaaatcaaagtgccgatctcaaagcgttttgttgataaaaaagggaatgtcattccgtttattttaaaaccaattactactgaacggattgatgaattagagaaagaaaacaccacatttaaaaatgtgaaaggccgcggccgcgtcaaagatttagactcccagcgcttttatgcgagaattgccatcgaatctactatttatcctgattttcgttcaaaagatttaagggaagcatacaaaactgcggatccggtagaagttgccaaacgtgtattatctgttgggggagagtatgcgaactggctgaataaagcaattgaaatcaatggttttgaagatgatcttgaagatctagaagaagaagcaaaaaactagtaaaggatggcgataaggaagctgtgtatttgtactatgcaatgcatgagcttcattactcgccatcccaacttcttgaattatatgaagcaccaaaacattttaaagctcttttatttgggttgataggttataagctagatctattagaaaaagaatcaaggagaggagggaactaatatcgcaaaattaacagcccgttttgatctcgaagacaaggtatctaaaaaactaaaacggatacataaaggattccaagaggtcgaaaaaaaagtcaaaaccattaatcggcaaatcaaaatcagtatcagagcggaagatcaggcattttaccggctgagaaaaataaacgactatatcattttgaaattcgcgaaatcgcttgagattaaagttgtacttgatgaccaagtcacatcaaagcttgatgcaattgaaagaaaacttaaacggctgccgaaagaaacgaagctgactgtctctttggtagatcggacagcagctgcgtataaaaaaataaagaagatgctttctaatcaaaagctatcattccttttgattccagatgacaaggttacttctacagttaaaaggattatcggttatattaagaaaaatttgaaaaacggatacacagtaaaactaaaggtcatcgatgaaatcaccaaaacagttaatcgattaacagcccttctaaggaaatttgaaaaaacctattatgtaaaagtggttgttaagacaaaaatatcagacaaaatcaataaaaaagaaagcccgattaacaaagaaacttctaagaaagaatcagacaaatcctcagataaaggctctgataaaaactcagatcaaaaacctggatgggtcggaaaaataaaaggctggctgaaggattggtggacaaaatcagcttggccttggatcaaagatacgctcaatgaaataggcaaagcttttttggatcgtttcaaagagagattgatagaaaagctgaaaaatgatgtgtttgataagatcattgataaaattctaggaccacaaaaaaaggacgattctggtgaaaattctgacacagataaaaaagtccttaaccgtaatacaggaggaaattgttgctgtgactgctgtgaaggcggtatcagcccgggcactaaaaataaaaaaacctatagaaaaaagaaaagtcccacaaaggctccaaacagaacactcaaggttcctggagaggtgataagaagacgtcaaagcggcacacctgctgaaagtgcacctaggacctcgggttccaagttaaagaactggcttggaggcttaaaatcgctagggaaggattcatccaaactaggtaaagcgttcagaggaatgggaaaggctgttccatacgtaggatctgctttagcagtgtttgatttagctggaatcaataaagataatgctggcgaaaaggttggttcaatcggaggacgcattgccggagcggaagctggtgcaacagccggagcggaagctggtgcaacgattggatctttcgttggtccggaaggtacagcaatcggcggggcaatcggcggaattggcggcgggttagtaggcggaatcggcggcgaagaagcaggtaagaacattggtaagatgtttgatacttctaagttaaaggagagcataagcaattcactatttaacaaagagtggtggagtggaaaatggaactccatttctgatactgccaatggggctattacttggattgaagatacatggagtaaagtttcaacttggtttgaccagtatgtgtttacacctatatataatgttgctgtacctgtaattaattttatagtaggattgtttgcctatgcatgggatggcatattggcagtatggaacattgtctacccgtggtttaaggataacgtgtgggatccaataagcggagcagttactaatgttgctacaacgatatggactggattgtgcaacgcctggacggttatttcaggcatatggtctactgtttcaacatggtttatggacaatgtgtggaatcctgtaagtgaagccgtaaccactgcggcaacatggatttggagtaagatcaatgatgcatggacaataatttccaatatttggacaggagtatcgaattggttttatgataatgtatggaacccgatcgtcaaaaaagtagaagatattaaaacttcaataaaagaaaaattcgatgatgcaaggaaattttttgaggatgcatgggatggaattgaaacttggtttaatgaacatgtgaaagatccattggttaaagtatcagagaaaattgctgagaaatttcaatggctattcgatttaaaagattcagttggtggtttcgttgcaaaagtaatacacaggggggaagaagttactcacctcaagaaaaaaccaatcaaaaaggattcgaaagagaaaaaaactagttccaaaccaactactaataacatttttgctcaatctccatcaaataataatatgactgtttttcaacaagcactagatcagaacgccacaggcggctacatcaccaaaccaaccatctcgtggatcggtgaagccggcaaggaattcgttatcccggttgataacaaccgaggccgggggaagatgcttctttcacaagcggcgtctaagctgggtatgcaagttgtagacgacatgggcgcagcttcgtcttctggcggaagtccagcatctgtttcaggaggagcagctgtcagtcctctatcaggcacagcctccccagtaatgaacactgcaaatcttacaggccaagcgtccacactcggacagcaattttcagaaggctttggtaaaggcatcagcgatcagccggtcaaaatggaagactggaaaaagaaaaacatcaatacgccatttacacaaatgatttctgcttcaccaaattacggtaaacaaatggtaagtgggtatgccaagggccaaagcggcactgcaaccggaacagacggctttttgcaatcaaaagttaaaacgccgttccaagccactgtgagcaaatcgtcttcatggggcacaggaacggtcaaaggctttgcgcaaggacaaaattcaacccaaacagggactgcacagtatgtgagtacacatgttgacaaaccgttcctgcgttcaaaagacacatcgaacagctggggctccggtttgattggaaactttgtgacaggcatgaattctaaatccagtgaagtaaaacaagcagcaaaggatatggccaagagagtggagcaggctttccgtgaagaattagatatccattcaccttctcgtgtcatgatgagcttagggcgttttgcctccgttggtgttgtaaaaggtctggattctgtcgatgtgaaaaaatatgctgaaaagcaagctggatcactggcagctgcttattccggaatgggtgcagtaggtggaaatgtgaagcagtggcttatggctgcaatgatggccacaaaaacaccattaagctggcttccgggattgatgacaattgcaaagtttgaatcaggaggcaaccctaacgccattaacctgtgggatagtaacgcgaaggcaggcaatccatcccaagggctcatgcagacagtaccaaccacttttaacgcacacaaagcgccaggcatgggtaacattagaaacccgattcataacgctgctgccgcaatcggctacatcaaaagcagatacggctctattgacaatgtacctggtattaaaagcatgaagcatggcggaccttatgtcggttacgcaaacggcgggctgattacaaaagaacaaattgcacgtgtcggtgaaggaaacaagcgggaatggatcatcccagaggaacgtggcatccgaggccgctacctccttcagagagctgcgcaagctctgggaatggaagtgacagatccgtctcaatcccagcagtctgagctttcttcaggacaagtttcagcagttacatccggtacacggcaaacgatacaaacagccggaacgaaagaaataaagattgagtttaacggagaccagcatttccataatggacaagacgccgaaagccttgcagcgaaaatcaagcaggcgcttatagatgaattgcaaaaggatatcaatattggaacgaagggagtcgttgcatttgactaaatccgtatatgaattttggatttcacaagggaaggacaagttgcggctccccgttcttcccgaccagctgaatatttcaaatacgattcagaatgagacggttaaagtagccaagttcggtgaccttacatttattgacgaacaaggagcgaaagaaatttcgttctcttcgttttttccgaagaaatacagcccaatagctgaatatcaaaccttcccgtcgccggaaaatgcgataacaaaaattgaaaaatggatgaaggccaaaaaaccggttcagtttttgattacgggaactaaagtgaatttaacatgcagtattgaaggtttttcctatagcgaaggccagcaggatataggtgatcgttcctttgatattcaattaaaagaatacaaaaccgcttccccgcggaaaatcaagcagaagaaaaaaacaaaggcaaaacgtccgtcgaaggctgcgccgaagacgtacacagtgaaaaagggagacacgctatgggacattgcaggcagattttacgggaacagcacccaatggcgcaaaatttggaacgccaataaaacagcaatgatcaaacgaagcaaacggaacatcaggcagccgggccactggatttttcccggccaaaaattaaagataccgcaatgaaacaggtgatgtatgatgatagaactgttcgtcattaaagacacagagtggcttgagctggttgcagaaagcgtatcgcttgaaggccatcgttatcaggcgccgcgttctattgaagcaaccatcgtcaccaagcagggcgaccagacgtattacagtgtctcagaaggagatacggtcttgtttaaatggaagggaaaagagctgtttcggggcattgtttttgcaagaaccccggacgagcatacgcttgccttcagcgcttatgacatgcttcagtacctggtcaaaaaccaggatatgtacgtgttttccaatcagcgggccgaccagatcataagaaggattgcgagtgacttccagataccgacaacctcgatcgcaaacacaggccatacgatcaaaagtcttgtcattaaaaatgatacgacattgtatgacatcatattaaaagcgctgaaacagacgaaaagccagacaggacgacattaccagctgtattcggaaaaaggaaagctcggtctgcgcgcttggccagatccgtcagaagtatgggtgcttgaaacgggcgtcaatatcacgggctaccaatacagcacttctataaacgatactgctactcgggtggtgcttcgccggcagaaggacaataagacatataaagcctctgccaaggacagttcaggcttaaataaatacggtgtgcttcaatatacggaaacggtcacagatgacatcaaccaggcacagcttcagcagcgggcagatgtacgccttgctgaaaaaaagggcgtgaaaaaagaactgaaaaatattcaggcagtgggcattccggaagtgcagagcggcttgcccgtctatatttcgattccagaggccggcatcaagaaaacctattgggtagatacggaccggcatgaatttaaaggaacgaaacatacgatgacgatcgatgttgtcgaaaagaatacgatgccggaaggagtatcctgatgagattaagtgaggctataaaacatttggcagtcggcgcaattgacgctgagtctccggtagaactgctcccggctgaagtcgtttcggtttctcctgtggaaatcaaattaaaagaaaacagcaaactgatcataccggaagacgccatcattatcccaaaacgaatgcagtccggaggagacgatgcactcgaaccgggggatcgcctcatgaccgcggctctgactggcgggcaatcgttttttattttagataaggtatagacaaaccgcttcagtacgaaggggtttttatttagcatgtaaaaggagtgggcatcatggccctgacaccagaagtggagtttgaagatattgaagatgtgagtgaaatcattgaaacctcgcaaacgtacaaaatagattttgaaaacggaagaattacgaatgagctgattaccgggcttgaagcgatcaggcagttcgtgtatatcgccttacagacagaacgctatgcgtattccatatacagccataatgtcggaaacgagcttcaggacgtgctgaccgatcatgagacaactgatgcctataaaaagatggagatcccgaggctgatagaagaggcgctggtttatgatgaccggatatcggctgtaacagattttgagattgaaaaacaaggcgacgcgtttcatgtgtccttcgtggtggagacggatgaaggaacgcttgagattgaggaggtgattggcgaagatgtttgaagatcagacttttgaagcgattatggagcgtatgctgaacagcatttccgcagatattgacacaagagaaggcagcgtcatttataatgcgttagccccggcggcggccgagcttgcgaagtcttatatatggctggatactgtgcttgagctagttttttctgataccgcacaaggcgaatttttagacaggcgtgcagcggaagcgggaattgaaagaactgccgcgacaaaggctgtcagagcgggagagtttacatctggagttactattcctgtcggctcccgcttttacgtggataatctttattttcaatatacggcagacgggacgctcatctgtgaaacacctggtgaagcaggaaacgccaacctgaccggacgcaatttactgtcattggataccattcccggtttagaaacggccattgtcaaagaaatcctgattccggggcgcgaagaagagggagatgacagcttgcgagaacggtattttacaagggttcggcgtgaggccgtcagtgccaataaaatgcattataaagagtgggctgaggaagtggacggtgtgggaaaggcaaagatcttcccgctttggaacggtgaaggcacggtcaaaattgtcgtcaccaatgcgaatcttgagcccgcttctcctattttaattcaaaaagtgaaagattatatcgaccctgaaccaggacagggagagggacaggcgccaatcggagccgttgtcacagtggagagcgcggtctggaaagaagttgagatttctgccgaagtgctgcctgagatcaatcactcaattgatgaagtgaagtcagaaattgaggaaggcgttttaaatctctttaagaaaatggcgtttgaagataacgtcatccgcctttctcaaattaacaatatcgtctataattcaccatcagtcagtgactactccaatattcaaatcaacggcacgtctgaaaatctggtgttgagcgacgtggaaattcctaagcttgggcaggtgaagatcattgagcaaacaagatgacatgcgagcttatctgccgccgtttctcaccagccttaaagaaatggctgagctgctgaaagcggaagcgcctgagtttgataaacaaaatgacagcatatttgatctgacggatcagttattcgtgccgacggcgacatgggggctcagccgctgggaaaagattttaaacgtaccgcgggaatcaggtgacactgatgagatcagacgattgaggctcatttccaaaatgtcgaacatcccgccaatcacatacagggccattgagcaggcggtaaaccgtttcttgaaaaacccgtctgcacaggtccgcctgattcccggcgaataccgatttaacgtcgatatcaatgttgatgacctccagcacatgaatgagctgatcgaagcgatagaaaacatgaagcccgctcatttggcgtatacgctcagaggcggattgaacgagacgctgcaaatcaaagacacagttatcctgaatcatcgcagataccgaacagccagtgagctcaaggtcggttattctgtcactcttaacaataatgaggtggtcttaacttgatttcaaccatatacagagaacgcacagcggctgatctaaaaagcagaatcgatcacgtgctgctcaacggccaaaaaacagaaatagtagatctcaccattgacggtgcgaccgtcaccattctgacaaaacgtgaggaagacatcaagcatatcgaaacggtacaaatttttgacgagctgggcaatgtgatcacagagagaaagactgacctggacgtcagcgaaaacagaacacttgatttcagatttacttttgaggtggtgtaaacatggcatacgaagaaaaaacagactggcttccggacgaccccatcaacgaagatgacgtcaaccgctgggaaaaaggaataaaagacgcccacaccgacctggccgcccacaaaaacgacatgaacaacccccacaacacaacgaaggcgcaaatcgggctggggaatgtggataatgtgcagcaggcggcgaagaaggattttgacaagcatgtgaatgacggtacgattcacattactgctgctgaaaggtcaaagtggaacaacgctcagttaagtaagatatcaggtgatgatggaagggtcttttacaagagtgtgaccgaaattactgattataatgatttaaccgatactggtatgtacttaatatacaatgacggcttgaagggtccgggcctaaatcagtgttttctccttgtgatgagctataaaaacacacttgttcaaatagcttatgacggaattaagggagagcagtcattttttagaataagaaaaaacgattctacaacatggacaccatggattgaatcagaaactacagaggggtctcaaaagaaaatagatgcacatgctaataaaacagatatccacgtaacaaaatcagataaagacaagtggaacgactcacagctctttaaaataactcaggataacggtctcgcaaagtactgtgaagatgcagatttcaatactgtcatcgaaactggattctattacatgagtggtgcgacaacaacattaaatgctcctgttaataacaatggttatttaatggtttataatttcagcacgtatgcatatcaagaatacacgtcttatagcagtagtgacacaatatcaactggccgaaggaaattcatgaggaataaagtggctaactcagacgtttggacatcttggcgtgagatcgaatcggttgaaggctcacagatcaaagtagatgcacatgccaataaaacagatatccacgtaacaacatccgataaggacaaatggaataatgcacaactatatagattaacagatactcaaggttgccgaactaaaatcccagatgggactgacttgttaacactaccctctggcttttactatgcattagggaacgtcataacaaataatcctgtttcaggagatggatcatggtataactatgatgttatcgaaacagagggaggcggacgaaaaacaattttggcctctagaagttatgacggaaccttttggacggcaacgatccatacagacggcgtgtttaaaggctggaataagatcgagactgaggtaagtgctcaaaccaaagcagataaagcgctagctgatgctaaaaactatgttgactctaattatacgaataataaattaacagttcttacaggctctaatgcaatacaagacgcaagaactggggggaatgaatatcctccagggttaacactaatggatattggtcaaggaaatactacaggttatccacttggttatggaattgtaaaaaatgagaaatacagtgattttagatttactcaatatttttacggtacaggaaatgaatcaaatagttatattgatagtactggaacgtgggttcgtcactggtggagtggttccggctggactgcgtggcaaaagatatcagggtttgctcacgctaatattgggactactgggcgtcaagctcttattaaaggagaaaataacaaaattaaatataaccgtattataaaagatagccataaattgtttgatacaaaaaacaataggtttgtagccagtcatgcaggaatgcatttagtcagtgctagtttatatatagaaaatactgagcgatactccaattttgaattatatgtttatgtaaacggcacaaagtataaattaatgaatcaatttagaatgcctaccccttccaataacagtgataatgagtttaatgcaactgttactggatctgttacagttccgcttgatgcaggagattatgttgaaatttatgtttatgttggttattctggagatgtaacacgatatgttacagattcgaatggagctctcaattattttgatgttctggagcttggcggaagaaattacccgagagtttaggaggtacctttatgatcttatatgatgccattatgtacaagtatccaaacgcagtatcgagaaaggattttgaattgcgtaatgacgggaacggttcatacattgagaaatggaatctccgggcgccgttgccgactcaggcagaactcgaatcctggtgggaggaatcacaaaaaaacccgccgtacgagccgcctgatcaggtggagcttctcgctcaagaattgtcacaagaaaagctggcacgcaagcagcttgaagaactgaacaaaactttgggaagcgagttgtcagatataaagctttccatactttctttgaaaggagattactctgaatgaattattgggtgcttgccctctattatgagtgggcgacaacggatatggtgaaacaggccttagcatatcaagactgttcaattgaggatctggcagagggtgtgaacaaaaagctgatcacagctgaccagtataaagaaattaccggtaaagccatgtagtaaggcttttttattttgcctgtttttagatcaaaggaggatgaagatggtgaagtatcaatatgaatttcctctcgataaggctggaaaagccggcgctgtaaagccctatcgaggaggaaaaaatgattttgtgacacctgtttcgaatttgtcaggcgtagcggagattttaacaaatgcttccttaaaggcgactgaggcatacagtcagctcgggcaggacaggcttggcgcagttctgatttcgaaagtgaagggctgggcgtatgcagatcgtgaaggtacgctctttatagaagaaagcgacaacaacaatgtttggacaacgacagcagcagttaatgtcgcagcaggtgtcctgacagcgacggactgggtatacctttctaaacgctattaccgtttccgctatgtgaacgggaatcttcagcaatctgagtttgtattataccaatcagtcggtgcgggtgagatggatgtgcgtgtcaatggaaaaacgcctttacagattgactttgcggagaatcaaacacacgatggacggctgaaagtcgaggctcgcaaaacatttgactttgtctttcatgaaaatgcagagtccgccggcgagggtgcttctttacctgttgacggtgccgcgcatttactcgttgaagtatatggcacagcggaaatgagcgaagtcaaattttggggcaaatcggtgtcagggcagaaactgccgatcagaggcgtgaaaactgatgatgccacctctgctttgagtacattaggaaaagctgaggcatgggccttcgatattaaagggtttaaggagatcatcatggagatcgtcagtatcaccggcggtactctctcggtaaaagggaccgctgtttcataacagttttggctctcggaagggaggtgatctgcatgtgaaggaggagtgaataatgcagcaagaggcagatgtgaatgtgtttcagcaggatttagcagacatgaaaggcgagcacaaagcacttgagcagagggtttccgcattagaacgcgtgtctgaccgtcaagaccagcaaatcatgacgctgaacgaaaaattaaacaaaattgaagaaaacactacgtggattaaacgcaccatcacaggtgccatcattacagcagtgtctacaggcatcattggcggagccatcgccattatgtacagcctgctgcagcattaaagggggattttcatgaacacgtttgacaagggcacggtcatcaggacggtgcttcttttaattgctttaatcaaccagaccatgctgatgctcggcaaatcaccattggacatacaggaggagcaggtcaatcagctcgctgacgctctttattcagccggttccatcgtatttacaattggaacgacacttatcgcttggtttaaaaacaactacgtaacagaaaaagggaaaaagcagcgcgacgtgttaagggacaataatctgacgaaataaggagagatgaaaatggttaacattatccaagactttattccggttggcgcaaataaccgtccaggctacgcaatgacgccgctttacattacggtgcacaatacagcgaataccgcagtaggagcggatgctgcggcccatgcccgctatttgaaaaatcctgatacgacgacaagctggcattttacagttgatgatacagaaatttatcagcatctgcctttgaatgaaaacggctggcatgcgggagacggaaatggcagcggtaaccgggcttctatcggaattgaaatttgcgaaaatgccgatggcgattttgaaaaagcaacagcaaatgcccagtggctcatcaaaacattaatggctgaacataatatcagtctcgccaatgtcgtccctcataagtattggtcaggaaaggaatgtccgcgaaaattgttagatacgtgggattcgtttaaagcaggaattgggggaggcggcagccaaacttacgtcgtgaaacagggcgacacacttacatccatagcgagagcatttggtgttacagttgctcagctgcaagagtggaacaatatcgaagacccgaatcttattcgcgttggtcaagtattaattgtaagtgctccatcgtccgctgaagaacccgagctctatccgctccctgatggtatcattcaattgacaacaccttatacctcaggagaacacgtctttcaggtgcaacgagcacttgcggctctgtatttttaccctgataaaggcgctgttaacaacgggattgacggcgtttacggaccgaaaacagctgacgcagttgcccgttttcagtctgttaacggtctaactgctgacggtatctatgggcctgcgacgaaagcgaagatcgcagcgcaattaagctgatcacagaccataaaaatcccggagctgctccgggatttattttttcttcttcaactttttaataattccagcactgcgctccctcacccgaagcgagtacccggaaagcccaaaccttccgtaatcaacaaacttcacacgcctcaccaattttttcactgtatcacctgacattatcctctgtttgtatttattatatgtaaccctttaagaaaaggaataaggacaagagctgttttcccttgtccttttagtgtgatcatgctttttttcgtttatactcgtcaatcagccgttcgttttctttgaagattcttgctgtatgcggactgacttgatagcttgcgacactggtggttgaacgttttttcaggattttaaacggcttcgccgctctgggctcgcatctgttttgaaacgcacgttccattatccttcaccttcctcctcaattggcagcaccaaatcatatatgctcgttaatgacgtaaatagcaaataatcaaattccgtgacaatgctgtcagacgtcagcttgatgacatagttctgtgtctcgatggtaaaagggatgagaaccacttttccgtattggtcgtaataaacatcctttcgatcgagccgtgtttgtacatctgccggatcatccatatgctcggttaaccggtctttatcagcctgtgtcgaatagtggcaaagagaagccgttaagttcattttatcagcataggttttcagcagcttatcaataccttcagcataagcatctatacttccataataaacatggatcggctcgtttttcaataggtattggtatgttttcagccgattgagatacatgtggagcatttcgttgttttcttcaagaatttctcttgtgtctgtttcaagctcgctgccggccagttttttgacgtatgcacttaagaagataaaagcatcaatcaaagcaaaactgactgcgacaatgagataccgttcccagtgggtaaatagggaagtgggctcatatgtccagtataccatagcgcctagaacaaacagcaaataccaagttttccggatggcggacattttttctttgaccttcgcttcgaaacgccacgtggcatatacgtataaccccagtccggccacgatgcaccagaccatgatctgaaagaataaaaccatattcgaatccctcacatttgaaataggttctgcttattgtattcgagagatccggatggttttcctgttccatcaaaaaaaccgctcctttgacagaagcggtgtgacattaaaatatcatatttaaaataaagtaggcgatggcaccaagtgtcgctgaaatcggaagcgtgatgacccatgtaatgagcattcgcttggccgtaccccagtttacaccttttacgcggtgggacgcaccgacgccaagaattgatgaagaaatgacgtgggttgtactgaccggcaaatgaataaacgtggcgccgaaaataatggctgctccggttaagtcagcggaaacaccgtttaccggacggattttcatgatctttccgccaacggttttgatgattttccagccgccgattgatgttccgagacccatggctgtcgcgcaggcgaattgtacccaggtaggaatatcattagcagaagtatgtaaattcgctgtgatgagagccattgtgataattcccattgctttttgcgcatcgtttgttccgtgtgtatacgattgcagggcagctgttacaatctgcactctgcggaattgcttattcgttttcgccaagttgctgtctttgaaaatcagcttaacgatgctataaagaataaaaccaaggacaaaggcaataattggtgataggatcagtgcttcaatgattttaatgaagcccttatagtttaacgctgcaaatccggctgccgcaatggctgcaccggcaatagcgccgatgatggcatgggatgagctgcttgggataccgtagtaccatgtgataaggttccaggcaattgcagcgagtagcgcagccaaaatgacaacagagccattttccagcgtataaggatctacgatgtctttcgtaatggttttggcaacacctgtaaacgtcattgctccgacaaagttcatcacagccgccaatataatggcatggcgcggttttaacgcttttgttgataccgaagtcgcaattgcgtttgccgtatcatgaaacccgttgatgaaatcaaacgccagagcacaaatgactattagtatcgttaatattaatagaatatccatttttacccctcgttacgcgtttttcataatgatggtttcaagattattggcaacactttgacaagagtcggcgatttcttcaagcgtttcgtatatttcacgatattgaatgactttgattggatctgtttcatttccgaaaagattctttaatgattttctgtgcaagttgtcacagctgtgctcatactctttaattttgattgcgtgaggctgaatatcctttaagcgattttctgccagcagctcgatcgtaatcaaaatctctttcgcacattctctgatatatccgctgaatttatcaatatgctcgtctgatgaagtaattgagaaaatctccatcatggcagagaaatgttcgattccgtcaagcacatcatccaagctgtttgtcagctgaaggatatcttcgcgctcaataggagtgatgaacgctttgttaagctctttaatcatgacatgaacatgattgtcaccttttgtttcatattcctttaacgtatctgcaaattctttaagagtcgtttggttagtgaccttaaaattcacaaaatattctgcagtttcgtctatgttctttgcaatttctgttaaaaggagtgagaacttatctttttttcttcttatcattaaaaaccctccatagtttgaatgaacaatgcacacatcaaattattatatagccttttgtcgaaaaaaaacaggtaaagtcgaaaaaaacgtatcttgacttttttgataaatcgtgtctccttattttgacctacttcgctttaaaaaaacgacccaagtttgcaaaaactttctgcttaacgtaaaaagtatatcaaaagttgtgtttttcctgtcaacttttatcttctgtttcaccaaaaaacggttccctaaacaagggaaccgttttatcagcttgcttttcgttttttcatcccgtaatagacaggcagcccggcaaggccgatgaggatggataatccgcagctcattgtatctgtaatgagtgtgctgcctagcacaaagaaggagcccgcgattgccagaattggcatagatggataaagcggaacactgtaggcgcgcttttttccctttgctcgcttgcggagaataaacactgcaaaaaaggccatcacataaaaaatgtagatcatgaaaatggagatttctgagagcttatcagggttgctgatcagcatcataatcaaagccaaagcaatttgaaaagaaatcgcaatccatggtgtgcggaacgacgggtgcacatgtgacagtttttcagcaaatggaagctgtttgcgttccgccattgcaaatgaaacacgcgggaaagaaagcacctttccatttaagcacccaaagatgctgacgataatccctacactgatcagctttccgccaattgacccgaacagcatggttgccgcggtgcttgtcgcattttcaccaagcgtgacaatttcgttcgctgacaggatgtggagcaatgcaaaattaatgaaaatatagatcgctgttacaattaataatccgcccgtcatagcgcgtggcagcagcttttcgggatttttcatttctccgccgagagcggcaaggagaatccatccgtcataagcaaacaacgtagctaaaatagccgccccgaagttcatatcggaaatgctttcgtttactgctgtgaagatgtgctgatcgcctttccaaaggccaaagatgatgatgcaggcaatcggaatcagttttccgatcgttgtcagcgtttggacaaaaccgccatattttgtaccaataatattaatgacgcataaaaagagaactgctatgattccaatgacttttgatagtccagatccccagccgaaaagattcgccattaaagatccaaaatataaacccagcgcgccaataatcgccgggccgtaaatgataatctgcacccagccgcacaaaaatccccaaaactcgccgtacacttcttcaaggtacgtataaagaccgccggtttttggaatctgcgttccgatttccgcgattgtcaaaccgcccgccagtgttaaaataccgcctaacagccaggcgaaaagcgctgtttttgaatcacctgaataagcaagcacagcgccgggcttcataaaaacaccagaaccgataatggttccgatgacaagagtaagggcaaacaagaggcctatctcttttttcaaaccgttgtcttcagtatgcatgtccttaacctcctatgatgttgaagcttcatgttgaagaatctattttttcatattgtaaaccctattttagaaaagtgaaataaaataaattttctgattttcgaaatttgctttgtgtacagcaaataaaactgtaaaaacgcttgttttaacaatctataaacgaataaacttcatgatttttatttgcaaagttcgtgttttctgtattaggattttagccggtacggaggggagaattcagaaaatgaacgaaccttcggtgaagctgatatgttgactttctcatgcgaataaaatactttgttattagaacaataaatatacaactatgatatgatatctcgaaatcgagataaaataacctggagggacagcgtatgaaagttaacggcattcaccacgtatcggcattaacggccgacgcacaaaaaaacttggatttctataagaaagtattaggattaaagctcgtcaaaaaatccgtcaatcaggatgaaccgacaatgtaccatctgttctacggagatgaagtggcaaacccgggaactgagctgacgtttttcgagattccccgcattgcaccgtttcatgcgggaacaaacagtatttcttctattggattgcgcgttccaagcacagaagccctgcattactggaaagaacgttttgaagcgcagcaagtaacgcacagcggtatatccaaaagagctggacgtgacatattggcatttcaagatcatgaagggcagcgacttgtgctgactgctgatgaggaaggaaaaggatatggcctgcctgttaaacagagcggcattccggaaaaattttcgtttcgcgggttagggccggttgaactgactgtgccatatgctgaaccaactttacacgtattgacgaatattcttggatttacagaaatcagccgtgaaccagtcgaagggcaaggaaccgccgttattctggaatcaggagaaggcggtgctgcaacggaaatccatttaatagaaagaaacgatcttccgcgcgagcgtcaaggcaaagggagtgttcaccacgtcgcatttcgggtaagagatgaagaagaacttgccgggtggcaccggatcatcagccgcgaaggctttagcaattcaggcatagttgagcgctactatttcaaggcgctgtatttcagagaaccgaacggcattttgttcgagttatcaacagacggaccgggctttatggtagatgaaaatcttgatgagcttggccaaacgatcgctcttccgccatatcttgagcatcgaagagctgaaattgaagcgaaattgaaaccgatccaataaattgtgattcatttgccctccggcgcgccggagggcttttttattttgggaaaacgcatcgccgattacgatttggagaaagggctagaaaccagctgtatataggatgattggcatgaaatggcctcggcaaaaatattgtctttgtttattaatagtttattcatatttgcttgttacactatttccaagttagccaaaaggagtgaaaaacacgtggaaaagaaaaaacgcgagctggatattttcctcatcctcattttgctcgcatctgcattcttaaatatctataacatctggaatgatgatacggtgaatccttattacaccgctgcagtcacaagtatgatgcaaagctttcataattttttctatgcctcattcgacgcggcggggtttataacggttgataaaccgcctattacgttccagatacaaaccatcagcgcacttatattcggtatgcacggctggagcgtcatcctgcctcaggcacttgctggtgtaggttctgtccttttaatgtatctgttaataaaaccgacattcggtaagacagcagcaagaattgcctctttcatcatggcatgtacaccgattgctgtagctgtagcacgtacaaacaatgttgatgcattactggtatttttcttattgcttgctacatggcttctctttaaagcgatcagaaaaggaaagctgatctggctgttagcagcatttttcgttgttggagtaggatttaatacaaaaatgctgcaggcttacatgattttaccggctttcttattgttctatctgattgcggcaaacgccacaatcaagaaaaaaatcgtttcattggtaagtgcgttagccgtattagcagccgtttcgttatcgtggccgctcattgtcgacaatatccctgcaagcaagcggccttatatcggaagcagccaaaccaactctgttttggaattggctttcggctataacggaatccagcggctgacaggccaaaattcaggcggcggccagggtgcgccaaacaaagacgcttcaaaagaaatgtcttcttctgataacactcaagcaccgcctaatcagtcatcaagcaacagctcatcaagcgatggtaaatcctcaaatggcaatatggcggcgcctccatccaatggccaaatgccaagcggcggtcaaggaggccctccaagcggcggagatggcggccaaggcggacccggcggagacggagggaaaggcggtacaggaactggttcgaaaatgcaatcaggttcagggatgtttggaacgggaacacctggtccactgcggcttttccaacaagagttatctgatcaaatcagctggcttctgccatttgcgatatttggaatcgcaggcttactgatcgctggcgcgagagaaagaagaagattatctatagagcagaaggaaacggtgttctgggttgcgtggcttgtaccgattgccggattcttcagtgtcgcagaatttttccatcattattatctcatcatgctggcaccgccgattgcggctcttgtcggtgcggggtgggttgctcttgttcatctgtaccgcaatcagacaggctggaaagcatggcttttgccgggagcaattattgcgacaactggatttgaattgtttattctcagaaactacaacgatcaaatcggtgcaggctggagcatcggtgtaggtattatcggcgcattgtcagcgattgctttgctgctgtttaaacagcgccaaaaaccgttcagttattatgtttcacttgcagctctcctcgcattgctggtgatgccagtttattgggcaagtacgccacttctgtacggaggcaacagctcactgcctgaaacaggccctcagctcgcatcaatgggcggaaaaggcatgggaatgtctgatgcgactgtaaatgaaaaactgatcaaatatctagaggagaataactccggagctgaatacctatttgccacaaccgattcgaacacagcggcaccatatatcattaaaacgaaaaaagctgtcatggctattggcggatacagcggttctgacccggcgatcacactgactcaattcaaaaaacttgtaaaagaaggaaaagtgaaatacttcttggcttctggaatgggaagaggcggaaacaatgacattgttgaatgggttgagaaaaatggaaaagaagtagcatcagaaaaatggcaatcaagttctgatcaaaaaacagaaaatactgattcggctgatacatcaagcagcaaggcttcaggtgaaaacggcaaaatgggcggacctggcggaatgaatcagtcagcaacattatacgaactacatgctgataaataggaggcaaaaacatgagcagacatattcaatattcaattgttgtacctgtgtataatgaagagcttgtcattcatgaaacctatcagcgcttaaaagaggtcatggatcaaacgaaggaaaactacgagctgctttttgtcaacgatggcagtaaagaccgcagtattgagattttaagagagcacagcctgatcgatccgagagtgaaaattattgatttttcaaggaattttggacaccagatcgccattacggcgggtatggattatgcacaggggaatgcaatcgtcgtcattgacgccgatttgcaggaccctcctgaactgattttagatatgattgaaaagtggaaggaaggctatgaggtcgtgtacgccgtgcggactaaacgaaaaggggaaacctttttcaaaaaacaaaccgcggctatgttttaccggcttctcagcggtatgacagatattgatatcccgattgatacgggggattttcgtctcatggacagaaaagtctgtgatgaaatgaagagattaaaagaaaaaaatccatttgtcagagggctagtcagctgggtgggctttaaacagacagcggtcgagtatgtacgtgatgaaaggcttgccggagaaacaaagtacccgctcaagaaaatgctgaagctgtcaatggacggcatcacgacattttcacataaaccgctgaagctggcaagctatgcggggattttaatgtcaggtgctggatttctgtatatgtttatcgtgctgtatctgaagctattcacagacagcacgattaccggctggtcatcacttattgtgatccagctcctgttcagcggcattgtccttctgattttgggcgtgatcggcgaatatatcggcagaatctacgatgaagccaaagacaggccgctttacatcgtccaaaaatcgtatggaattgaaaataaaagactctatagagaccagcatatgtcataacctcaaaccccctgtccgtaatggacaggggtttttatgctctgagcccgatctaaagcaaaagatgctgatagatatatggaaattgggtaaagaagagattgtgagcttgtactgcggttcagtcatgccgaaataaaaacagcaaaacttaaagatttcgtcatcggctttgctgcatgtcagctgttatattggggggcttttaagaaacgcatgattagagccgtaccagttatgtttaatagaatactggtacccaatacaattccccacgtcaacgtcgattcagagagaagaaagctcagtaaaagaaaagccaatcctgcgcagatcatactcagtcccacggttttcatgttcatgcctcctagcaaacgatgtttctagcatctgatgtgaatgatgtcaatctgtatgatatacggatatctcgtcagaaagtttcatagagcaattaggtcttttatctaataaaaagcctcagaccgcttttacggcctgaggcattatgtcttacgaagttttctcttctttttgatccagtttaatttttttcgtcatttctttgccgtttcggagaattttcacttcaacggtatcaccgatctttgcgtctttatataagatattgcgcaattcactgcctgtatcaatttctttaccttttaggccgatgataatatcctccgcttttaatccggccttttcagcaggagagcctgaagcgacctcacggatgtaaacacctttattcagctggctgccgaacaggccgagtgtgccttcttggtaattttgcggcacttgttctagatcaagcatgctgacaccgatatatggacgttcaatttgtcctttagacagtaattcttcagcaatcggttttacgtcattgcttggaatggcaaatccgataccctcaacatcatcttcactgattttcatactgttaatgccgacgattttgccgtctgtatttaacaaaggaccgccgctgttacctggattaattgctgcgtctgtctgaatgacgttaatgctcgtttcgccggctgatgtagacattgaaaccgttctgtccacgccgcttacaattccttgtgttactgtgcgggacaggtcttttccaagcggatccccaatcgcaataacggtctcgcctgttctaagatcagatgaatcaccgaagtttgccacttttgtgacgtggtcatcactgatttggaggacggctaaatcagttaacgagtcactgcctaccagctttgcagtaacctcagtgccgtcatataaagataccttcagtgatgatgccccttctacgacgtggttatttgtaatgatataagccttgccattctcttttttgaaaatgacacctgaccctgaaccgctttctgtatcttcgctggaatcagaagaactagagccgaacaaagagctgtttgattgtgcctgaagatttgtaataccgacaatcgctggtgaaaggtcttctaccatatctgagattttagaagagtcctcgctcttgaatgcagatgagctgcttgagctttttttagattcagaggaggtgcttgttgctgtaacagattgcgtttgctgctggctggatgattgttttgcagtgtcctgagaatcatggtcgccaagcggtgtaaacgtgtaaatgccaagggcaagactgccgccgatcactccgccaagcaacggtctgaaccatccgaagcctcgttttttcttctcctgatcatgaatgacattgcgggccgagtaggaggtgctctgatcgttctctttcgttaaaaagacctcattctcattacctttcgttctgttttcatcacgatagttatccatcatgttcactccgtttctctattttcacatgtctatttatattgataggtttatgacttgagtttatcataaacaaaaactgtgggataaaaatgaaaagattatgggaaattgtgaaaaagtgcggaaaacggtacacttcatattgtatatgaaaggactgagtcgatggaacagattggattgattggatatggcagcatggcggatatgatcgccagacagctgttgaaacatgaacaaataaaagagaatgagctatttattgagacgagaacgaagggggagcggctgcgggcactcatgtcagattatccaaacgtatcggctgatccgttggagaattgggcaaatacgtgccaattgattttgatatgcgtcccgccgctccatgtcatcgaaacaatgcgccgtctgcacccgtatgtgaacagaaatactcacatcgtatccatagctgccggtgtgccgctgcgtcttttggaggcagaaacagaagccggtatctcacgtgttattcctgccattacgtccgaagcagaagctggcatctcacttgtcgttcacagtgaagcactggctgcagagaaaaaagaatatctgaatgaattgttatcggttttcagccgtgtacgagaaatcaaagaatcgaatttagatgcggccagcaatttaacgagctcggcaccaggattcatagccgcaatctttgaagaactggcactgtctgccgtcagaaacagcagcctgtccaaagaagaagcctttgattttctgattcattcgctatacggaactggcaagatgctgatcgaaaaaaatatgtctttcgaggagacgctggaacgtgttgcaaccaaaggcggaataacgggagagggagctgaggtgatacgcgcctctgtgccggacgtttttgatgaggtgtttgaaagaaccctgaaaaaatatgaactgcttacagaacaggttggtaaacagacatgaatccttgaaagaggattcttttttattactgaatggttgagattttccccagttatattgcatttttcctctttttttaatataatctgttagaatattcataatttagtaaaaaaggaggagcgttatgaaattgtacatgtcagtagatatggaaggtatttcgggtcttccggacgatacctttgtggattccggcaagcggaattatgaacgcggacggcttatcatgactgaagaagcaaactactgtattgctgaagcgtttaacagcgggtgtaccgaggtgctggtcaatgacagtcattcgaagatgaataatctgatggttgaaaagcttcaccctgaagcagacttgatttctggtgacgtcaaaccattttcaatggtggagggactggatgatacgtttacaggcgctttgtttctcggttatcatgcgagagcctcgactcccggtgtcatgtcacacagcatgattttcggcgtccgtcatttttacataaacgatcggcctgtcggtgagcttggattaaatgcatacgttgccggttattatgatgtcccggtattaatggtagccggggatgaccgggcggcgaaggaagcggaagagcttatcccgaacgtgacgacagccgcagtcaaacaaaccatttcaagatccgcagtgaagtgcttgtcccctgcgaaagccggacggctgttgacagaaaaaactgcgtttgccctgcaaaacaaggacaaagtcaagccgctcacaccgcctgacaggccagttctgagcattgaattcgccaattatggccaagcagaatgggcgaatctgatgccgggaacggaaatcaagacgggaactacaaccgttcaatttcaggcgaaggacatgcttgaagcctatcaggcgatgcttgtcatgactgagcttgcgatgcggacatcattctgctaaaggggtgttttaggctttggcgcgatacatgataaagcgtttttgggcaatggcagctacgattttggtgattaccaccctgacttttgttctcatgaaggtcattcccggatctccttttaacgaggagagaggcacaaatgaagccgttcaaaaaaatctcgaagcctactatcacttagacgatcctctcattttccaatacattttctacttaaaatccatcattacattcgatttcggaccttcaattaaaaaaccgtcggacagcgtaaatgatatgctggaacgcggatttcccgtttcctttgagcttgggatgacagcgattgtcattgctgtgatttctgggctggtgctgggcgtaatcgctgcactccgccgcaatggctttttggactacgccgcgatgagtcttgcagtactcggcatctccatcccgaattttattctggcaacattgctcattcagcaatttgctgtcaatctcaaactatttcctgctgcgacatggacgagcccgattcatatggtgcttccgaccgcagcgcttgctgtagggccaatggcgatcattgccaggctgacacggtcgagcatggtcgaagttctgacacaggattatatccgcacagcaaaagcaaaagggctttctccattcaaaattatcgtaaaacacgcactcagaaatgcactcatgcccgtcattaccgtcctgggcacactcgtcgccagcatcttaacaggaagctttgtcattgaaaaaatctttgccattccgggaatgggaaaatattttgttgaaagcattaatcagcgggactatcccgtgattatgggaacgaccgttttttacagcgtcattctgattatcatgctgtttttggtcgatttggcctacggtctcttagacccgcgcattaaactgcataagaaagggtgaagcgtgtgaatctccctgtacaaacggatgaacgccagccagaacagcacaatcaggtgcctgatgagtggtttgtcttgaatcaggaaaaaaatcgggaagccgattcggtcaagcggacgagtttgtcatacacgcaggatgcctggaggaggctgaaaaaaaataaattagcgatggccggactctttattcttttatttctttttgtcatggcagttatcgggccctttttatcgccccatagtgtcgtacgccaatcgctgacagaacaaaatcttccgccctcagccgatcattggttcggcaccgatgaactcggccgggatgtgtttacccgaacatggtatggcgcgaggatctcgttgtttgtcggcgtgatggcagcactgattgattttttgatcggtgtcatttacggaggcgttgccggctataaaggcggcagggttgacagcattatgatgcggattatcgaagtactgtacggcctgccgtacctgcttgttgtcattttgctgatggtgctcatgggaccgggactgggcacgattattgtggcgctgactgtgaccgggtgggtcggcatggcgagaattgtaagaggccaggtgcttcagattaaaaattatgaatatgtactcgcctcgaaaacctttggcgcgaaaacctttcgcatcatccgaaagaatttgctgccgaatactatgggggcgatcatcgtacaaatgacattaaccgtacctgccgccatattcgcagaatcatttttaagctttctcggcctcggcatacaggctccgtttgcaagttggggcgtgatggcgaatgacggcctgcccacgattttatctgggcattggtggcgcctgttttttccggcctttttcatatctctgacgatgtacgcgtttaatgtgctgggggacggattgcaggatgcgcttgaccctaagctgaggaggtagctgtatggaaaaagttctgtcagtccaaaatctgcacgtgtcttttacgacttacggcgggacggttcaggcggtcagaggggtgagctttgatttgtataaaggagaaacctttgcgatcgtcggcgaatccggctgcggcaaaagcgttacctcccaaagcatcatgggcctgcttccgccttattcggcgaaggtgacagacggcagcattctatttaaaaacaaagacctttgccgtctctctgacaaagaaatgagaggtataaggggagccgacatttctatgatttttcaagacccgatgacggcgttaaaccctacgctgactgtcggcgaccagctgggggaagcgctattgcgccacaaaaaaatgagcaaaaaagcggcacggaaagaggtgctttccatgctgtcattggttggtattccagatcccgaagagcgcctaaagcaatatccccaccaattcagcggcggcatgagacagcggattgtcattgcgatggcgctgatttgcgagcctgacatcttaattgcggatgaaccgaccaccgccctggatgtaaccattcaggcacagattttagagctgtttaaagagattcagagaaaaacgaatgtgtctgtcatcctgattacacatgatttaggggtcgttgcccaggtagctgacagagtcgcagtcatgtatgccgggaaaatggcggaaatcggcacgagaaaagatattttttatcagccgcagcacccttatacaaaaggactgctggcttctgtcccgcggctggatttagatggagcggagctgatcccgatcgacggaacgccgccggatttattttcgcctccgccgggctgcccgtttgccgcccgctgtccgaacaggatggttgtgtgtgacagggtgtacccgggccagacgatcagatctgactcgcacaccgtcaactgctggctgcaggatcaacgagcagagcatgcggtgctgtcaggagatgcgaaggattgaacatgaaaagggggaagaggatgaaacgagtgaaaaagctatggggcatgggtcttgcattaggactttcgtttgcgctgatggggtgcacagcaaatgaacaggccggaaaagaaggcagtcatgacaaggcaaaaaccagcggagaaaaggtgctgtatgtaaataatgaaaatgaaccgacttcattcgatccgccgatcggctttaataatgtgtcatggcagccgttaaataacatcatggaggggctgacgcgtcttggcaaagatcatgagcccgagccggcaatggcggagaaatggtctgtttcgaaagataataaaacttacacatttacgattcgggaaaatgcgaaatggacaaacggagatcctgtaacagccggagacttcgaatacgcgtggaagcggatgcttgatccgaaaaaaggcgcttcatcggcattcctaggttattttattgaaggcggcgaagcatataacagcgggaaagggaaaaaagacgatgtgaaggtgacggcaaaggatgatcgaacccttgaagttacactggaagcaccgcaaaaatattttctgagcgttgtgtccaatcctgcgtattttccggtaaatgaaaaggtcgataaagacaatccgaagtggtttgctgaggcagatacatttgtcggaaacggcccgtttaagctgacggaatggaagcatgatgacagcatcacaatggagaaaagcgacacgtattgggataaagatacagtgaagcttgataaggtgaaatgggcgatggtcagtgacagaaatacagattaccagatgtttcaatcaggggaacttgataccgcttatgtccctgctgagctgagtgatcagctgcttgatcaggataacgtcaatattgttgaccaggcgggtctctatttctatcgatttaatgtcaacatggagccattccaaaatgaaaacatcagaaaagcctttgcgatggctgtggatcaagaggaaattgtaaagtacgtcacgaaaaataatgaaaaaccggcgcgcgcctttgtatcgcctgggtttacgcagcctgacggcaaagatttccgtgaagcaggcggagacttgatcaagcctaacgaaagcaaagcgaagcagctgctagaaaagggcatgaaggaagaaaactataataagcttcctgcgatcacgcttacttacagcacaaagccggagcataaaaaggttgccgaagctattcagcaaaaattgaaaaatagccttggagtcgatgtaaagctggccaatatggaatggaacgtatttttagaggatcaaaaagcgctgaaattccaattctctcaaagctcatttttgcctgattatgcggaccctatcagttttctggaagcctttcaaacgggtaattcgatgaaccgcacaggctgggccaataaagaatacgatcagctgatcaaacaggcgaaaaatgaagccgatgaaaaaacacggttctctcttatgcatcaagctgaagagctgctcatcaatgaagcgccgatcatcccggtttatttttataatcaggttcacctgcaaaatgaacaagtaaagggaattgtccgtcaccctgtcggctatatcgacttaaaatgggcagataaaaactgatggcggtgattgaggaaatactgcttctttatgcgaaggagcggtattttttctctttcttgcacgtatacgtagggtgcagagcaaatgaaaggagtgttttcgttgaattacaagccgaaagcgttgaacaagggtgatacagtcggagtgatcgcgcccgcaagtccgccggatccaaaaaagcttgacaccgcgcttttatttttagaagagctcggtcttcaggtgaagttgggcaaggcgctgaaaaaccagcacggctatttagcgggacaggatgatgagcggctggcggatctccatgagatgttcagagacgatgaggtaaaagcagtgttgtgcgcatgcgggggttttgggacaggacgtatcgccgcgggcattgatttcagcttgatccgcaaacaccctaaaatcttttggggatacagcgatattacgtttttacatactgccattcatcaaaacacaggtcttgtcactttccatggcccgatgctcagcacggatattggccttgacgacgttcacccgctgacaaaagcgtcatataagcagctcttccaggagacggaattcacctatacagaagagctttctccgctgaccgagcttgttcctggaaaagcggaaggcgagcttgtcgggggaaatctgtctttgctgacgtctacactgggcacgccatttgaaattgatacgagaggaaagcttctgtttattgaagatattgacgaggagccttatcaaatcgaccggatgctgaatcagctgaaaatgggggggaagctgacggacgcggcgggaattctagtttgtgattttcacaattgtgtcccggtgaagcgagagaagtctctctcgcttgagcaggtgctggaagactatattatttctgcgggcaggcctgctctgagaggatttaaaatcggccactgctcgccaagtattgccgttccgatcggtgcgaaagctgctatgaatacagcagaaaaaacagccgtaatagaggcgggcgtttcagaaggggcgctgaagacatgaaaatcattcgaatcgaaacaagccgaatcgccgttccgctgacaaagccgtttaaaaccgcacttcgcactgtgtatacggctgaatcagtcatagtaaggattacttatgacagcggtgcagtcggatggggagaagcacccccgacgttagtgattacaggagacagcatggatagcattgaaagtgccatccaccatgtgttgaagccggcattgcttggaaaaagcctggcgggctatgaggccattctgcacgacatccagcatcttcttacaggaaatatgagcgcgaaggctgctgtagaaatggctctatacgacggctgggcgcagatgtgcgggctgccgctttatcaaatgcttggcggatatcgagatacgctggaaacagattatactgtcagtgtcaactcacctgaagagatggcagctgatgccgagaattatctcaaacaaggctttcaaacgctgaaaataaaggtcggaaaagatgatattgcaacagatatcgcccgtatccaggaaatcagaaaacgtgtcggatcagctgtgaaactgcgtttagacgctaatcaggggtggaggccgaaggaagcggtaactgccattcggaaaatggaggatgcgggcctaggcattgagcttgtcgagcagcctgtccataaagatgatctcgctgggcttaaaaaggtgacagatgcaacagatacgccgattatggctgatgaaagtgtttttacaccgcgccaggcgttcgaagttctgcaaacccggagcgcagacttgatcaatattaaattgatgaaagcgggcggcatcagcggagcagagaaaattaatgccatggcggaggcctgcggggtggagtgtatggtcggcagcatgatcgaaacgaagctgggcattacggccgcggcgcattttgcggcaagcaagagaaacatcacacgctttgattttgacgcgccgctgatgctgaaaacagatgtattcaatggcggcataacatatagcggcagcacgatttcgatgcctggcaaaccgggcctcggaatcatcggggctgcgcttttgaaaggggaaaaagagcaatgatgcacactgtcatatcagcagtggccaacatctggacagcgcctgattcacctcgtccgtctgatcaattcatgcttcaaccgactgtaatgatcagagactggctggagcgcatgacgtatgatgaacggcttggattatgtacagacaatgtaatccaaactcaggttctctttggcgaaaaggtacttgtgacggcggaacagggggaatgggtttctgtgatcgtgcctagccagccatcccgaaaggatccgcgcggatacccgggctggatgaaaaagtaccagctggaaaaaacaaagcccatccatacacaacacgatgtgatgatcagcaaacctgctgcctttttgtacagaagcaatggggaaaaggagatcgaattaagctttttgacagttctgccccttattgcaaaagaaaacggatattttaaggtttcgaccgtttttggggaaaggtttgtgaggcaaagtgatgcagtgcctgtcagccaacagaaagggactgctgaagacatcattcaaacgggtgcgttttttcttggccttccctacctgtggggagggatcagcgggtttgggtttgattgctccggatttatgtacagtatatttaaggcgaatggatacagcatcccccgtgatgcgggagatcaggctaaggcagggaagggtgtcccgcttgatgatatgaaagccggtgatctgctgttttttgcttatgaggaaggaaaaggagcgattcatcacgtcggtctgtatgtaggcggcgggaaaatgcttcattctccaaagacagggaagtcaatcgaaatcctcacattaacagagacaatctatgaaaaagaattatgtgcggtgcgccgctgtttttcagaataaggagggagacaaatgacgccactgcctttgttagaggtcagccagctaaaaatgcattttgacgcagggaaaaagcggacagtcaaagccgtcgacggggtcacctttcagattcgtgaaggagaaacgttcgggctagtcggggaatcagggtgcgggaaatcaaccttggggagagtgctgatgcgcctttatcagccgacagaaggaagcgtgacataccgcggcacaaatcttcatgcactgagtgaaaaagagcagtttgccttcaaccgcaaactgcagatgatttttcaggacccttatgcttcacttaacccgcgcatgaccgttcgagaaattattttggagccgatggagattcacaatctctacaatacccataaagcgcggcttctcgtcgtggacgagctgcttgaggcagttgggcttcaccccgattttggcagccgttatccgcatgaattcagcggcgggcaaaggcaaagaatcgggattgcgagagcactgtcgctgaatcctgaatttatcgtggcggacgaaccgatttctgctcttgatgtctctgttcaagcgcaggtggttaacctgctgaagcggcttcaaaaagagaaagggctaacgtttttattcattgcccatgatctttcgatggtgaagcatatcagtgacaggatcggtgttatgtacttaggacacatgatggaaattacagagagcggcaccttgtatcgtgaaccgctccatccctatacaaaggcgcttttgtcctcgattccgattccggatcccgaattggaggacaagcgtgagcgtattctcttgaaaggggagctgccgagcccagtgaatccgccgagcggctgcgtgtttcgtacccgttgtccggaggcgatgcctgaatgtggagaatctcgtccccagcttcaagaaatcgaacccggccgttttgtcgcttgccatctgtatcgaaatgctgaaacgaaggaaaaagtgagataaataaaaagagtggctcctttttactagagccactccatttgtttatacttgatgtaaaaactttacacaaaccgggtaagggacagaaaccgttgatgggaggagtgtcaatcggccggtttctttgtctctttcaaacaagacaaggttgcctgtttcttcatttgaagcaacgaggaacccttccgttgggtcaaatacaaagtcacgaggccagtttccttctgtcgacactctttctacgaaagccagctctcctgaatattgattcacttcaaatacggcgatactgtcatggccgcggtttgcgacataaacaaaacgtccgtcctgcgtgacatgaattgcgcttccctggctgttatctgtaaaatcatcagggatggcagaaacgacttggatttctctaaattcgccggctgtcgggttgtattcaagcgcaatcacttcattgcttaattctgtcatgacataagcgtatttttctttcggatgaaaagcgatatggcgaggtcctgcaccgggagcgaaggaatggcttccggattcagtcaacacaccgtctttaagcttataggtgtagagcttatctatacctaaatcaaccgctaccacataattgtgttcaggtgtgaaccccgcgtagtgtgtatgcggtttttcttgtctttcgtgcggcccttttcctgtgtgagcggcctctgaaacaggtgattgcaagctgccgtcttcctgaaccggaaaaacgtgtaccttcccgctgtgataattggcagtcaggacgaattgattttgatcatcaatgcttacgtggcatggcgaagggccatcaattaactgatgattcagaaatgtcaattcgccgctgtttttatcgatttgataggcagcaactccgccttggccgtctgctttttcgatggaataaaggatggtgttgtttttattcggcgccacatatgtcgggttgcccagcttagcggccagctttggctcgctgagtgcttttttctcagtatcaagctcaaatgaataaattccttcgcttccgccttttgtatatgttcccacatatcctatgtattttgtcatgcgatttcccccttaaaaatgatgtcacctctatattaacgtatcttgataaaataagctgttcaaaacatgaaaaaggggaagattcttcattcgcctcgaatcagcggcattgtgcagcacctgaaggagccgcctgatttaataatttctgacaggtcaatttcgataatgtgatagcctcttttcgatagctgttgattgacatggcggttgccagggagactgatgatcgtttttttttcgattgaaaggacgttggtgccaagcgtaaattgttcgtcctcgggcacctcaataagatcataacgttttgccagcatatcggctgcaactggctcaatggcctgtggataaattaacgcttcgctttcagatataatgttaaatacgcagtccaaatgcaaaaatttttcatgaagcttcactggaacgatcgtatattcaggaagtgcctcttccagctggccgatagctgaaatgtcggtgcgctggctgattccgacatagacaatgtcatcatcgataatgacgtctccgccttcaatactcgtatcaagcatgcgggtgtaagagataccttggctgtgaaaaaaatcttttataacggcttcttctccttggcgaatcggttcagtcatgcttgacagaaaggctttttctccgatgacaaatcctatgtccctagtaaaaacctgctctggtagtccgtcgcgaacgggcaaaaggacgacctcaacgttgtgtgacctaagtgcctccactaagcggctgtgctggtcgttagcggtttttacatgaatattgtcatcttcaaaatgtttttgtgtttcgtttataacatcttttatggtcatgtgctcaggtttgcataagatcactttctgaagtgtgccgtattccgttcggcataccgttttgtgctgagatttcgggatggatacgtccatttgtttttcctcctaaagtgtgaagaatacatttattattccctcatcatgaaaatcattaaaccattttaaattttagacaaatggaagagaatattgtttaataggagaatataagtgcatttagctaaaagatcagacatcaaaggggagaaaggtatggaaacaccggaaacaagattttgtaaagagtcaaaggttgtgaaaaccagcagggtgttcccgcttgacacgaacaaccataatacgctgtttggcggaaaattaatgagctacatagacgacattgcctctatttcagcggcgcgccattgcagacgtgaaacggtaacagcttcaatggattctgtagattttttaaagccgatcgggcaaaaggattctgtctgcctagagtcatatgtgacatgggtcggcacatcttccatggaagtatttgtgaaagttattaaggagcatttgatgactggcgaacgggaactcgctgccacatcctttttgacatttgtcgcattagattcaaatggcaagccggtgcctgtaccgagggttgtaccggaaacagaagaagaaatcatgctgcataatacagctgtacagcgtgctaatgaacgtaagaaccgcaagaaacacagccaggcgcttgcgaatgcgcttggaactgataagccttggtgaacgttaaacccaaaacataagttgttttgggttttttttttgtacttttcaatggtgattattgcaatggttagtccgtttttgctaggggattctataaaaaagcaacaaatgtcatgttaaattgataattttgtgacaactttattaaagattcattttagatatatcttttattcgtaagatcatgtattttaaagatatattatgaatacatcttttcgaaaggattgtttataaaatgttagataacaaaacaatcgaaattattaaaagcactgtacccgtattgcaacagcatggagaaacaatcactggccgtttttacgatcggatgtttcaagaccatccagagcttttgaacatttttaatcaaacaaaccaaaagaaaaaaacacagcgaactgcactggcaaatgccgttattgcagctgcggcaaacattgaccaattaggaaacatcattccggttgtcaaacaaatcggccacaagcaccgcagtatcggaattaagcctgagcactacccaatcgtcggtaaatatttgctgattgcgattaaagatgtattgggagacgctgcaacccctgacattatgcaggcatgggagaaagcgtacggagtcattgctgacgcgttcatcggaattgaaaaagacatgtatgaacaggcggaagagcaagccggcggctggaaagagtataagccattcgttatcgcaaaaaaagagcgggaaagcaaagaaattacatccttctatttgaaaacggaagacggcaagccgttacctgaattccaagcagggcaatatatcagcatcaaagtgcggattcctgattctgaatatacgcatatccgccagtacagcctgtctgatatgccgggaaaagactattatcgaatttccgtgaaaaaggatggtgtcgtgtcttcctacttacacgatgggctgcaggagggagattcaatagagatcagcgcaccggcaggggactttgttttagatcatgcatcacaaaaagatctcgttttgatcagtgccggagttggcattacaccaatgatcagcatgctgaaaacatctgtttccaaacagcctgaacggcaaattctgttcattcatgcggcgaaaaacagtgaatatcatgcattgcgccatgaagtagaagaagcagcaaaacattctgctgttaaaacagcatttgtgtatcgcgagccgacagaggaagaccgtgcaggtgatctgcattttcatgaaggacagattgatcagcaattcctcaaagaactgattgccaacacagatgcggattactatatttgcggttcaccgtcgtttattacggcaatgcataagcttgtatcagagctcggaacagcgccggagtctatccattacgagctattcggcccgcaattaagtttggcgcagtccgtttgaacacatacatgaaactcttctcctttcagagaagagttttttattgagatataagaaggcagacaagcgccggtttctacatccggacaatcacagacccttgccatttgtgcatacacggttttgctgttcttgcattgttttcagcaattcattgtttacctcaatcgctctaattagttgctccatccttagctccaaaccggccagcctgtcgattgtttgctgctggtagctctcgggttggggagccaaaggcagatcaaagggccaaagggtattcgacttctgatttttcatattgcgtattgcgcctccaatcggtgtcactttctattatgttatgttcaggcgatatgcacgttcgcctagacactgatgcatagagggcctgccacggggtacaataggctcaatatgaccagcggatggaggtaaagatcggtgttatggatggtatgggtatttttactgaagccagttatcgtattttcgattgcatatattttgtttcggcttgccggtaaaaaagctgtgtcacaaatgaacaattttgacctgcttttgaccttcgcaatcggaaccattatcagtgagccgatccttacatccaagctgccgatgtcaatttattatgcgggtgcttttttggtgctttatcttatcatgagcaagctctctttatctaataaatggcgatggctcctagtcgtgagcccgactgtcctaatccgaaacggggatattgatgaacgcggccttcgtaaagaaaggctgactgttaatgagctgcttggaaagctgagggaaaagggctatgccgacccggctgacattgatcttgctatcattgaagaaacgggagaagtaagcgtcatcccgaaagaggaagcgagagcggtgcaggtgcgggatttaaatatggaagctgaacggaattttatcccgattccgctcatactggatggcgaaatccttgatcataatttgaaatatctccaaaaaaaccgatcctggctgtttgagaagcttgaggaaaaagggtacagccccaaactgctgtcttcgattacccttggcacgatgaatgcacgcggtgatatatcccttgatttaaataccgctaatgaaccgcagcatgatccttacttatataaaccgggaaataacaattaagatggctctctcttgtaatgagagcttttttcttttttaaagggaatttttgtttggtgtcaaatgtacctagttaggaggggaactgaacatgaaggacttatccataagaaacgacatggcgccaacggtcagtttgctgtattccgcagtggaagaaaacagtctccgtctggcttccatcgtaagccatatgacacacagtgaactttactataaggggcgctgccaaacaaaaaacagcacggctcagcttttgcaccatatcacaaatgttgatatcagatgggtctggcgtatcaaggaaaatcggatcccggaccatattgaacaggcatacggcccgatgacagatgaaagcggacggctgcctgaaccggtgaatcagccaaacttagatgaactcctgaaaagacatcagcatgtagtagagaagctgaaatcggtatgcttcactttaactgaaaatgctttgaaccagccgctttccttcgaaggtgacaccgcgacgatacgatggggaatttggcatatggcagatcataaccgctatcatcaggcacatattgaagctctcaaaaaagaatggaagcaggatgtggcgaagtatgaacgctaaaacgaagcttgtgactgatcgaattcgtttgcgctgtatggaagatcgggatcaagccactttgtttgggctgctttttaatgatcctgacgtcatgacatattattccggtttaaaagataagaggcaaacccgcgagtgggtcaattggaaccaacgaaatgaaaaagggtacggcgttagtctgtggatcgccgaagataagcggacaggggagtttttggggcaatgcggcatcgttccccagcagatcgaaaatcaaaccgtaatggaaattggatatatgtttgcccgccgccactgggggaacggctatgcgcaagaagcagctcgggcctgtctggacatggctttaacgagcggcagttcggcaaaatgacggctttgattgatccgggtaacaaagcgtccatacgggtagcggagaaaatcggcatgcattacagcaaaacgatcagaaaatggaataaaccgatcgaggtatatgaaagaaaatcttacaattgaaagatagagctcagtttagtatcatgatatcatgtaaagttttctagggttccgcatgtcaattgacatggactggtccgagagaaaacacatacgcgtaaatagaagcgcgtatgcacacggagggaaaaaagcccgggagagtcaatctcatgtgagacgactgtccggggtttttttgttttcggagaatcctaatagatagaaaggaatgactcaaaatgaaatggggattggtcgtgcttgccgctgttttcgaggttgtttgggtgataggcttaaagcacgctgactcagccttaacatggagcggcactgccatcggcatcatattcagcttttaccttctaatgaaggcgactcacagtctgcctgttggtaccgtgtatgccgtctttaccgggctcggcacagcgggaacagtacttagtgaaatcgttgtttttcatgaaccggttggatggccgaagctattgttaattggtgtgctcttaatcggtgtaatcgggttgaagcttgtgacacaggatgagacagaggaaaaaggaggcgaggcataatgctgcactggatcagtttattgtgcgcgggctgtttagaaatggccggcgtggcccttatgaatcaatatgcgaaagaaaaaagcgtgaaatgggtgctgttgatcattgttggttttgccgcttcattttccttgctgtcgtacgcaatggaaaccattccgatgggaacggcttacgcggtctggacaggaattggcaccgccggcggggcgcttatcggcatcctcttttacaaggagcagaaagacgccaaacggatcttctttatcgcgttgattttatgctcagcagttggtttaaaaattctgtcataaattgatttttatcaaatcttcagtataatggataaatagtttagacttacaaagataagagggattattcatgaaatcatatatgactcagcggttggacgaataccgtgacggaaatgaggataaagggcggctcttggtcagctgccccgatcagccgggtatcgtctctgcagtttccgcgtttttatttgaacacggtgccaatattatagaatcaaatcaatatacgacagaccctgaaggcggccggttcttcctgagaatcgaattcaactgcgcaggcattcgtgagaaaaaaacatcacttcaggcggcgtttgcctctgtagcggataaattcgacatgacatggagcttaactttggcaagtgaattgaagcgtgtcgccatttttgtttcaaaggagcttcattgcctgcatgagctgatttgggaatggcaaaccggcaacctgatggcggagatcgctgttgtcatcagtaaccatgagggagcgagagagctggttgagcgcctgaacattccattccactatatgaaagcgaacaaagacatcagagcggaagtcgaaaagaagcagcttgaactgctggagcagtacgatgttgatgtcatcgtgctcgcacgctatatgcagattctaactcctgattttgtttcggctcatccgaatcgcatcatcaatatccaccattcattcctgccagcttttatcggtgcgaatccgtacaaacgggcctacgagcgcggcgtgaaactgatcggtgcgacatctcattatgtgacaaacgatcttgatgaagggccgatcattgaacaggatattgagcgtgtggaccaccgcgataatgcggaagcgctgaaaaacatcggaagaacaattgagcgcagcgtgcttgcccgtgctgtgaaatggcatttggaagaccgtgtcatcgttcatgaaaataaaacaatcgtctttaactagactgcaagaggcccgcgcaatgcgggctatttttgatgacaaaaaaccttgacaagtgtcttttttctttgcataatataaaaaaatcattgagcgttgaagaggattagtaagcagacctttctgtgacagagagcaaaatgaatcgctgaaacattttgccgcatgaaacctgccgaacctgccttggagtcctagggggaaaacctaggcgcataacctggcgttacaggagagcggagcgtgcacaagcgcgttcaatcaaggtggtaccacggaaacccatttcgtccttatgaatcaggatgaaatgggtttttttattgtagaagagccgcggaggagaataaatgaaaaaacaaagaatagtagtgaaaataggaagcagttcgctcacgaatagcaaaggaagcattgatgaggcaaaaatcagagagcatgttcaggcgatttccgtgttaaaaaaagcggggcatgaaatgattctgattacctcgggtgccgtagcggcggggttttccagcctcggttatccgtcccgtcccgttaccatcaaaggaaaacaggcggcggccgcggtcggacaaacactgttaatgcagcaatatatgaatcaatttaaacaatactcattaactccgggacaaatccttttaacgagaaatgatttttcgaaaagagaacggtaccgaaacgcgtatgctacgataatggaattattggaacgcggcgtcattccgattatcaacgagaacgattctacatctgttgaagaattgacattcggagataatgatatgctttctgcgttagtcagcggattgattcacgcggaccagctcatgattctcaccgacattaacggactgtatgatgccaatccaaatgaaaatcctgaggcgaaacgatttgattatttgccggagatcacgcctgaattgcttggatatgcaggttcagctggatcaaaggtcggcaccggcggaatgaaatcaaagctgttagccgcacaaaccgcgttgtctctgggagtgaaagtattcattggaactggcagcggagagcaaaaacttgcggacattttggacggcaggggagacggcacttatatcggagacaaagaactatcttcggttaacaacacaaggcagtggattcagttccactcgccgatatcgggagaaattatcattgatgcgggtgccgaggaggcgatgatccataatggaagcagccttttgcccgctggcgttgtgggcgtgaacggaagctttccgaaaggggcggtcgtggaagtcaggggaccgggcggcgtgatcggcaaaggccaaacccattactcctctgaggagattatggaggccaagggcaaacgcagtgacgaacttgattttgagaaaacgtttgaggttattcataggaatgactgggtcaatgtaaaagactaggaggcggaaaaatgagtgaagtttctgtaaaagcgaagctggcgaaagaagcagcagccgaaatgatcatgaaaacaacaaccgagaaggatgaggcgctcagcctcattgcaaacggactccgtaaagaactggattttctcttggcggagaatgcaaaagacattgagaatggaaaagagaatggtttaacaccggacatcattgaccgtctcacattggatgagaaacggatacgcgatatcgcggacgcggtggagctcttaatcgacttagcggacccaatcggcgactctcttgaaacgattgaaaaagaaaacggcctgtttattgaaaaaatccgtgtgccgctcggtgtcgtaggaatgatttatgaggcgaggccaaacgtcacagttgatgcggctaccctttgcctgaagacagggaacgcggttgtgctgcggggaagctcctcagccatccacagcaacaaagcgctcgtcagtgtcattcacagagcacttgagcaatcagcgcttccgattcacgctgtgcagctgattgaggatacgagcagagagacagcaaaagagctctttacgttaaatgatggcttagacgtattgattccgcgcggaggcaagaaactgattgatctcgttgtgagagaatcaacagttcctgtattagaaacgggagcaggaaactgccacatattcattgacgaaacagccaaaccgcaaatggcagaaaaggttgtcgtaaatgccaaaacgcagcggccttccgtatgcaacgcgattgaatcattgctgattcacaaggcatgggcaagacagcacgggaaagaattgctggcccagctggaaaacgcgggagttgaaattcgcggtgatgaacttgtatgtgaacttcacccttcaagtaaacaagcatcaaaagaagattgggaaaccgaatttttagcgcctgtcctcagcgtaaagacggttgaaaacgtccaagaagctgtgaagcatatccaacaatacggcaccaatcattcagaagcgattttaactgaaaatgacaaaaacgcggcatattttcaaacggctgtcgatgctgccgcggtctatcataacgcgtcaacccgctttaccgacggctttgaattcggctacggagccgaaatcggcatcagcacgcaaaagcttcatgcaagaggaccgatggggcttcctgcactgacttctacaaaatacatcattaaaggaactgggcaaatccgtgaatagcggggcaatgttcaatgaaaaagcttatctcattacgagataagcttttttatacgcgaaaaattgacatttcaaatttaattgtgtacaatttaattgtataaaatatatcgggggaatgaaaaatgagtcagccattatttacagcaactgtttcagcggtaggaggaagagaaggaaaggtcatttcatcagaccgcgttcttgagcttgatgtcgcaatgccggggacaccgagagccaagaaattagaaaaagcgacaaatccagagcagctgtttgcagcaggttatgcagcttgctttgacagcgccctgcagcttgtcgcaagaacagaacgggtaaaagtagagacagaggttacagcgaatgtaagtctgttaaaggatgaagcggaccagggctacaagcttggtgtgacgctgcaagtaaaaggagaaggagtcagtgcatcagaattggaggcgcttgtgaaaaaagcgcacggcgtctgcccgtactcaaaagcaacctccggaaatattgatgtgacacttgaagttgctgaataaataaaaagaggatgcctgtacaaggcatcctcaatttttttgatgaagtgtttccagcaatgtatatagagcggattttaactgtttgagatcctccccagactgctttgagagccccagaattgtctctggaatgtcaaccgctttttcttttaataacgctccgtcctctgtcaggctgatcaacacggaccgctcatcctcttcagatctttttctcgtaatcaaaccctgttgttccattcgtttaagcatcggagtgagcgtccctgaatctaaatacagctgttcgcccatttttttgacagtaagcgtttcatgttcccataacaaaagcaaagccaaatattgagggtatgttatattcagcttatcaagcagcggcttgtattgctttgtcatttcccgcgaacttgcatatagcaaaaaacatagctgattctccaatttcatatgatcaaatttattttccattttgttcaccaactcttttttgtcattcgattctattgtatctgaaaaacctcacttttcctattctcggcaaacatagcatgtttaaaaagattagaaagggaaatataacaactagatacaaataaggaggttgggaaatatggcactatttacagcaaaagtaaccgcgcgaggcggacgagcaggacatattacatcagatgacggtgttcttgattttgatattgtcatgccaaatgccaaaaaagaaggacgaaccggcacaaatccggaacagctctttgcggcagggtatgctgcatgcttcggcggcgcgctcgaacacgtagccaaagagcagaatatcgaaattgattcggagattgaagggcaggtcagcctcatgaaggatgagagcgacggcgggtttaaaatcggtgtcacacttgttgtgaacacgaaagatttagatcgggaaaaggcacaagagcttgtcaacgccgctcatgaattctgtccttactcaaaggcaaccagaggaaatgttgatgtaaaactcgaattaaaataatgaccggcatcctgagtgttctcaggatgtttttttggtgtcggagcatgcggggcgggcacagatttatgataaaacttcagagaagcgtttgaagcatgcctttaaaccaaaagttacagatgaagcgggtggctggcacggtgtctgccgtgctgaattgcgcgtatatgctgttttgtatttgcacagggcatagcggctacttggagaaataacaaggaccaggccgcgcatgcctgatccttttaatattctttcttattggcgaagttccgccatgcttgaaacggggataaatgctctgttagtgtcacttgataaaaggggatcgttctttcttcagcaggtttatcaatttctttataaatgaatgaatcatcaaacccggcttcggcagcgtctgtgtgctcagctgcatagaaaacggctttaggccgggcccagtagatggcgcccaagcacattgggcatggttcacagctcgtatacaaaatgcagtcatcaagctggtaggctcctagcaccttacaggctttccgaatagctgtgacttccgcgtgggcagtcggatcattgcttgttgtgacgttgttctgtccttctgcaataatggctccgtctttcacgataacggctccaaaaggcccgccaactcctgcattcaccccatcacgagcaagatcgacagcccgctttaagaactttttatgattcatcccaaaccctcctgtcagttgagtgttataagtatagccgaaaaaggggcaaagaacattctcaaaaaagtgcaaaataaacaaagtatttgggggatttgctaagataagaggagaaaagaggaggggtaatgatgctgcatttatatattgccaggcacggacagacccaatggaacgtggaaaaacggatgcagggctggctggattctgatttaacagaacttggactgtataacgcccgcgctcttggggagcgtctgaaggatattgaattgaatcaggtatacatcagcccgagcaagcggacagaagagacagcaaaaaccgtactgggatcgcggaggctcccgctggttaaagatcatatgttcagagaaatgtcactgggctcatgggaagggaaaaaacaagaagatattgaaagggacgaaccagatctttttcatgcttattttcattatcccgaagcttatcgccagcagggatgtgaaacgttttttgactttgaaaaccgggtaaggctggctctccaaactattttgagccttgtggaatttgatgaaaatggaacagccaaaatattaatagaaggggacgggaagcatcggaaaccgatttccgctttctaatagaaaaaaccatctgccaaagacagatggtttctattttatacaagctgtgtctgctgtgctctcgcctgttttgcggcttcaaccatgtttttcaatgcggcaaccgtttcttcctgctgtcttgttttcaatccgcagtccggatttacccagaagcggtcagtcggacagacggcaagcgcctcaacaataatgttgtacatttcttcagttgacggcacacgagggctgtgaatgtcatatacaccaaggccaagccctttcaaatacgggtggtcttttaagtaatctaaaaatcctccgtggcttctgctatgttcgattgtaatcacatcggcatcaagatcattgattgtatcaacgatatcttcgaagttgctgtagcacatatgtgtatgaatttgtgtctcgtttttcacggaagaagtggttaatctgaaagcttctgccgcccaagtcaaatactcatcccaatcgcgggttttcaatggaaggccttcacgcagcgctggttcatcgacttgaatgatttgaatgcctgcgtcttcaagcgctttaacttctttgcgaagggcaagcccgatttggaaggcgatttctttcctcgagatgtcgtttcgagggaaagaccagtttaagattgtaaccgggcccgtcagcattccttttacatgcttggaagtcaatgactgtgcgtagactgtgtctttcactgtcatcggttcaataaattcaacatctccgtaaatgactggcgggcggacacagcgtgagccgtatgattgaacccaggcatatttagtgaaggcgaaaccggccagcttttcaccgaagtattcgaccatgtctgtccgttcaaattcgccgtgaacaaggacatcaagctccaattcttcctgaatatcaatccatctttttgtttccgcattgataaagttttgatactgttcatcggaccactcagctttccgccatttttggcgtgcgctccgcacttcagcagactgcgggaagctgccgatcgttgtcgtcggcaaaagcggaaggccgagagattcattttgcagggctaaacgttcttcaaacggaatcggacgcttgaagtctttatcagttaattgctcaagctctttcttttgttcagaattggcgcctgttgcaaactgtttaagcgcctggatatcagccttagcctgctgaatctcttcgctgatcgccgcttttcctgatactaagccttctttcaaagctgttagctcggccagcttttcttttgcgtaggataatccgttcaataggtctttttccaaatgctcatcagggtgtttcgctactggaacatgcagcaggctgctggaaggctgaatccacagttcatcaacttttgcaatgctgagaatatcaagaacagcatcgagacgctcttcaaggtccgctttccaaatgttgcgtccgtcgataacgccggctgccagcactttgtctgtcgggaagccatgtgttttaagctgttccaggtttctgcctttgtcgtgaacgaaatcaaggccaattccctgaaccgggtaagagatcagctcttcataagcatcaacagaatcaaaatacgtctgcaaaagcacattcaaggatgaaagctcacttgtaatgctttcaaataattcttttgcaccgcggacatcttcactagaggcggtaacgagcgccggctcatcgatttgaacccattttacgccttcttcttcaagctctttcaaaagctgtacatataatggcacaaggcgtttttggatcgcttttgcttcagacggttcatagcctttagcaagcgtaacgaacgtataagggccgacaatcacaggctttgtttccacaccgtattcctgtttgatccggcgataatcttcgagttgtttgtttcttgtcagacggaactcaatgctctcgtcatattccggaacgatgtaatggtaatttgtattaaaccattttgtcatttcactagatacggcgtctttgattccgcgggcgatagcgaagtatgtatcggtagcgtcagtcaaatgtctgaaacgtttcgggatccagttgaagctgactgctgtgtcgagtacatggtcatactgtgtgaaatcagaaacaggcacaacatcaatctgctggtcaatttgtgtttttactgcggataaaaatagttcgtcgctttgcttcaaaaacgtatctttatcagtactgcctttccaatacgcttcaagtgcttttttccattcccggttcagtccgattctcggaaatcctaaattcgatgttttgatggttgtcattgtttctcctcctttatatgtaaaacactctctttcacccgcggatacaggctgctaagaggttttctcacaacaaaaagcctctttcccatgagagaaagaggcttttctacgtaaaacactgcctctctcatctctcagacacaatctgatggaattagcaccgtgccttatgagacatcagtctcggcgcgaaaagcagtgcgccccatttcacaatggtattacggtcggttgctgttggggtcaaaaggccaatccctcgcccaactctcgataagagaaaatgttattaattttttgaaaagttgaatcatttgttggtaatcttaacagtaattcaaattcattgtcaacatagaatttgaaatttttatttatatgatgtggtgtatattatataagaaaaataatcttatagggttaacaaatgtgattgctctgctttttctgcgagttcatcaggagctgttaaatacaggaatccattgcctgccagcgtttttgcaatatcaagaggaagtgtcctgcggattagctgtgcgaaaacctcagattcagaaagctttctttgaaatgattcttcttcatagcttttgattaaagcaagcgcaccgctgacatgaggggcagccattgaagtgccggtcagcttaccgtacttcttgttgggaagggtggataagatattttctcctggtgccacaaggtcaatctctttatttgcgttagaaaattctgataattctcgtgctactgaaacagatccaactgcaatgacttcgttataagctgcggggtaggaaagctcttctgtgcgttcgtcgccgtcaccctcatttcccgctgcacaaacgacaagcactccgtttttgactgcgtttttcactgcttcttccagctctggcacatcgcttggccctccaagggacattgagatgatgtcgactttctgttccaccgcgtagttgatgccgttaattatccattcgtattgtccgctgccgttctcgccgccaagaaccttcacaatcaataggcttgcctcaggcgcgactccggcaatgcctccgtttgaatcattagctgcaattgttccggcgacgtgtgtgccgtgtccgttgtagtcggaaattgcatcttccttgccgccgtcgtcatccgtgaagttctttccgccgatgatttgattttttaaatcagggtggcttgtgtcgcagcccgtgtctaatacagcaactttaatatttttgccttttaccccttttgcccacatttctggcgccttaatcactttaatgccctcaggaagctcgtttacatccatgatctgctcattcgtcacatacgggatcaagcggatttcaccattcataaaaaagccctccttttttatgctttcaagtggattcaagggtgttgcctcatattatatgaaaaaaacaagcgctcggacagagccatttgaagcattttgaaaaaataggatacacaccaaagaattagtaattttcaaaatattggatggcttcggcgtgtatgactgggattcaactgtaagtcaagttataatagtgttggggaaaggagcagtgtcatgaaactgaatgaaaaattatatgcatttttttcagagcatgtggaacaaatggccgaggaatggattgaaacgatggaggaaagtgatccgaattcgctttacgccctacataatgcaacagtaacggaagaattgaaagagcaggacagagaattttaccggcatctgaattacatgtatgttttaccggaaaaacaatttctcgaagagtttcaagagtgggtcattgagctgaccaacgatcaaaaacatctcgacacaccggttcagtatgtcattcgggagtttatgagaaacaggagattatatacgaagtattttgagaagttcgcagaagaaaatgagtcagcgtttgaaccgggagagaagcaaaaatgggcagatttgattgtaaaagtatttgatttcaccatttatacattcgttgatcacgctgaaatgaatgccaagcagcaattaaacgcccaaagagaaatgatattggaactaagctcacctgtcattaccctgagcaaatcaacagctctgctgccgcttgtcggtgacattgataccgaacgggcgaagtttattctggaaaacacgcttcaagcttgtgcgaaaagacgtgtggagcatctgttaatcgatctgtcaggtgttgttgtggtggatacgatggtggcgcaccagatctttaaattgattgaggcgcttaatctgatcggtgtccggtcaaccctgtcaggaatcaggcctgaaattgcgcaaactgctgtacagctggggattgacttttcgaatattaccattaaaaccaaccttgcccaagcattaaactatcatcaataaaaaaatccgctatctgtgatagcggattttttatgatgcgaaacataaagatacgagaaaggatcccgcgaataataagaggacgaggcaaaagaacacccagtcgcgccggttcacgctcaatttcctataatatgtccggtttctgcttcctgtaaaacctttcgattccatcgcaagcgctgtccgttccgcttttctgatggcgcttgccaatagcggtatggtatatcgttttaacgcactgattttcttaatgatgccgctctccgccgctcctcctctgattttatgagcctgctgaatcagctggatctcatcctttaacagcggaagaaagcgaaagcctgcaatgacaccgtacgcgagctttggtgagagcctgcactgctggacaaggctcagcataaataaaatcggatcggttgtaaaaacaaacatcatcgataaggcggaaaagcataaaatacgaaacccaagggagatgccgacagacacattatcgctgttaattgagatagggcctgcttgaaacaaaaaattattcggtgttgtcggcacctttccaaaaactgcggctgtccacacgcacccgaatgctaaaatcaaaaacggaatcgtaaacaacaaccattttttcaatgggattccggccgccagtagaacgcccgcaacgatgatgatataaaaacatgccggagtgtaagggttgtaaataaacgacagcatgacgacacaacaaaaaaccgccgccgctttcacagtcggattaatgagatgtaacggctgcttcatcacgcacctcctcttgatatgccatccattcatatagaaggggaagggtgagctttgctttttggacaagccctgtttcttgagaaaacaactgcgctggagatccgtcaaaggccaggcctgtatcgtgaagcacaagcacgctgtcagcatacgaagagactagctccatatcgtgtgtaatcataaggacagcggttccctctgtcttgatacgctgaatcatttccatgcattcagtcaccgtgcgggcatcctggccaaaggttggttcgtctaataataaaacctttacgttatgcatgagcatagtagcaacgctcagtcgccgtttttgcccttggctgatcgcaaacggatgatgatcagccaaatgcgcaagaccaaaacgctgcagcaggtgttgcgcttttttctcagtttcagcatttgctttctggccgaacagaagctcgtcatataccgtatcggtgacgaattgatgctcagggttttgaaaaacaaatcccatccgtttacgcaattctttttctttatatttctgcagcggctgatcatagagaaggattttgccgctttgcggtttcatgagacgggccagaactgataggagcgtcgattttccagttccgttcggaccgacaagcgccgttaaagagccttcgcgcaacgaaaagctgatgtctttgaaaatcgcctgctgtcctctcgcgaacgaaaggctgctgacttcaagcacactctccccaggaggggctttcttctttttggcatgcccggcaggaataggctctttgaacagcatctcttttgataaagtaaacggcatactcagcttttcctgcagatgacagacctttggaatggcgatgcccaatttctttagtgtttctgcttcatgctgaaatagatttttcgtcaggccatccagcgcttttttgcccgatttgtcgagcacgatcgttctctcaatccaaggcgcccattcatcaagctggtgctcaatgacgaggaggctgaaacctttttcccgctgaagatccttcatcagatgaacgaactcccgcgctgagaaagggtctaaaagagaggtcggctcatctaaaataataagctcaggctccatcgccaaaatacaggcgagagccactttctgcttttgtcctcctgaaagggttgagatcattttttcttttaaatgggtaatgcgtaatttttctaatacggcgttgattttctctgtcatttcttcttttggaatttgcagattttccagcccgaacgctatttcgtcctccaccgtcagcatgcagaactgctgatcaggatcctgaaaaacgaccccggcatgctgagcaatcgtttcggaggtttcagcatctgtgaccggctgttgaaatagaaagacatgtccggactgaatgccgtcgcaagcctccggatatagaccgtttaaacaaagggcgagcgagcttttaccgcatccgctcggtcctaataataatacacattctcctttttgaagctcaaacgaaatgtcttgaaaaaccggtttctcgtcttcttcataagagaagctgagctgctcaaccgtcagaagctcatcaaaggcttgcatgttctgacgcccgcttccgtttctttttcagttcctttccgagtgccattccgtttaacacacctgtataagcgagagagtcgctgacagcttttccgagaagccccgccaaaagcgcgccggaaatgaggcggatcacaagcataatgagcagataacctggtgaataggctgcatagccagaaacaaagagatcatagataaagctggctactgaagaccccataccggccagcataaggacagggagagagtatgctttccagcgtgttgcaagaaatacagcctcagccccgagcccttgaacaatgccaatgacgatgaccatcgggccagacggatttcccagcaggcactcaacgagagcggcaatgatttcagaaacgagcgcagcacccggttttcgaatcatgtacgcggcgatcacagaaacgataaaccaaatgccgtaaatcggttcataggcgattggcccaaacatacctgcaagtacgtttccgaaatgtgtaaataataaataaacaacggcaaatacgatactgataacggacatgatgacaatttcttttactttccagcttttcatgttatccctgctttctgttttttcttgatggactgttagccgaaagattcacagtcatggtgatgtggtttgtttgctgctcagccatgcggaaaacggcttccaatgtgctgaatacgtcatgcgcatccccgtcaagctcgctcgcgtaatggacaccctgtacgaaagtgccttgggcttttgcaatgtcgacagccttcataatcaatcccatataatccggctcgttcattggataaagggcaaattggcacggcgcttccgccttcaagcctcggacagcatcttcattgacacgcttatcacctttggaaagatatgtatccccctgtgtgtcacccgggcatccaatggaaaacgtgccgttcatgacgatgtgtttttcgctgtttgctgcatgaaggtaaatggcttttgcagcatcgaatacatgatcaatcgatccgcgtaacaccgtgctgatatggtcggttttcgtccataccttggatgtatctgtttttttcaacgcagacttgatcacactgataaaatcatccgtcatcggatataaagagaagcgaaaaccggcgattctgcttgtaccgcaaatatgctccattttctccgacctcctgtttttttggtaaaataaaaaactgcatatcctaagggaatatgcagtcatagatcgattaagcgcacaaaaaaatacaccattcggtcaacctgcacttccccacgctggtattatccagatcgggtcataagggatcaaagcgcgtttcttccgcgctttatctcagccaaaacagcacccctagtgctttccgtatacaattttttattttgacatcataatagatgataagaatcattttgtaaacaacgaaatcatttttttcatatagggacgggagaggatgatcaaatttggaaaaaggacacatattaattgtggaagatgaagaaaaaatcgccagggttcttcagcttgaattggaatatgaaggatacagtgtcaccatcaaacacaatggcacagaaggtctggatgcggcagcgaaaggcgggcattccttggtacttcttgatgtcatgctgccggggcttagcggactggaagtgctgcgccgcttgagaaaaacggattcgcagacaccggtcatattattaacggcgcgagacagtattcctgataaggtaacaggtctggacatcggtgcaaatgactatgtcaccaagccgtttgaaatcgaggaattgcttgcgagaatcagggcggcgctgcgactaaatggaacaaaaacggaagatatcggcacctttcttacatatgacgatttacgggtgaacgaaaaaacccgtgaagtgagacgcggagacaaagaggtggaattaacgccgcgggaatttgatttactcgtctatatgctaaagcatccgcagcaagtgctaacacgggagcaaattctaagctcggtatggggatttgattatatcggtgatacaaatgtcgtggacgtctacataagatacatcagaaaaaaactggactatccttacgaaaaacagctgatccatacgattcgcggggtcggctatgccattaaggggtaaacgatgaagctgaagacaaagattcatctatacacatcaatatcactgttgattttattaattttggttcataccgcagtctatctcattttttcgtccgcgctgacatcaaaggatgcggcccggcttgctgatgagacggataacatggccgaagcgctgcgtgcggctgaaacagaaggagtggctttgcaggatatgctgcaggcctatcttccggcaaatggcatggtgcgtgtagtgaatggtgatcaaaaagccgttatgacgatcacaaaagaaaaagcctataaagattttcctctctcttttcatagcggagaaaaggcagatgtgaggaaacatgacggcaagctgtttgccgaggctgctgttccggtgatttggaccgatggacaagtggtgtctcttcagctggttgaaaggcttgagaacacagaagagagtctgtttctgttgaaaatcatcttaatcgctgcaagtgctgctgtctgcattgcttctttttttgcaggcagcttgctactagcccgccgaatcatcaatccgatcagacgattaatgatcacaatgaaagacatacagcgagacaaagaatttaaaacgatttctttagaaggacagtccaacgatgaattgtatcaaatggggctgacatttaatgaaatggcaatgatgctgaaggagcactatgataaacagcagcaatttgttcaagatgcttcacacgaattgaaaacgccgctcaccattatagaaagctacagcagcctgatgaagcggtggggggcaaaaaagccggaggtgcttgaggagtcgatagaagccattcactcagaagcggtgcatatgaaaaaactgaccaatcagcttttggcgttggccaaaagccatcaaggactcgaggttgatctgaaaacaatcgatctgattaaagcggcgcgcgcggttatgcaaacgctccagtccgtttatcagcgtgacatattgcttgaaacagataaagagagcctgcttgtaaaggctgatgaagaacgcatcaagcagctgttgaccattttgcttgataatgcaataaagtatagtgaaaagcctattgagatgtcagctggaacgaggaatggacggccatttttatcagtgagggatgaaggcatcggaatacctgaggagcatatcccgcatttgttcgaacggttctaccgggcagatgaagcacgaaacagaaaaacaggcggaacgggtttaggcctttccattgccaagcaaatcgccgatgagcatggcattgagctgtctgtcaaaagcaagccgggacaaggaacagctgtcaccatgcaattcagcgaacagaatgggggaggccgatgactaaaacaataaaaacagtatcttttgccgcagcagccattttagttgtcatcatctgtacgtttctcatcattcggcaaacccatgagaacgtattgtcaaaggagactgtcgtaaaaaaaatcgaatcctcttatgaaggcaaggtcacgaaagcaacacaatcaaaggataaaaaaacatatgatataacgcttgaaaatcaaaagggaacttactttgtaaaagcagacgcaatatcggctgacattctttcaatgaatagagtaaaagcagtgaatccatctgccatgacagaaaaagaagccgagcatctcgcgcttgagcgggtgccgggaacggtcaaaaaacaaacacgacaaagtcgagttgccacttataccatacaaaaagaagatgggaaaacatacgaagtgaaggtagacatgcaggcaaaaacagtcttgtctgccgatcaaatcagcagcaaagatcaacaaaaaacgccgattacgaaaaaagaagccaaaacaattgctgagcgagaaacgggaggaacagcggatgacgcagatctcgaagaaagtgagggcactctcatctttgaagtggacgttgatcttcctgataataaggaagcgacagtgaaaatcaatgcctacacaggaaaggtagctaacattgtgtatgaagactgacggtttctcatcaaattctcatcttgctctcgttttcctttcatgttgagtgtgtaaactgtactcatacaaaacaaaggaggactcacaaatgctcaagaaaaaatggatggtcggtcttttagcagggtgcctagcggccggaggattcagctacaacgcgtttgccaaagaaaacaatgaaaacagacaggcttcttctaagacggatgcactcactgaacaagaagcagaagcaattgctaaaacagttgttgacggcacagtagaagacattgacagagacctttacaacggcaaagaagtctatgaagtggagattgaaaaagaaggtgaagactacgacgtttatgtagatattcgtacaaaacaagcgcttaatgacccgctaaaggagaaagcagaacaagtcgccataaccaaagaagaagctgaagaaattgctttaaagcaaacaagcggaaccgtaacagaaagtaagcttgacgaagatgacggtgcttacatctatgaaatggaaatccaaacgaagcaaggaactgagacagaatttgaaatttccgcaaaagatggacgcattatcaaacaggagatagatgactaatcaaaacccccgctgcagcgggggtttttcatgataagaaaccttcttttggacaatctaagtagaaaaggaggcgaaacgcatggaaaagaaagaggagcaatacatcaatcaggctgaatatgtccctcatccgacgaaggaaggagagtacgccttatttcttcatgaaacgtatcatttgctttctgaagatgacgagacacaaacaacagaataagggcttaggcccttgttttgttccgtaattgtgatgtaagcgcatttattacttttttgagttgacacagcttgtttttttctgtaatctcagtgtgtcaattcaattaggaacttcgttaggtgaggctcctgtatggagatacgctgctgcccaaaaatgtccaaagacgccaatgggtcaacagaaatcatcgacataaggtgatttttaatgcagctggatgcttgtcctatgccatacagtgctaaagctctacgattgaaggcgcccgcacgctttttttgccgtgcttctttcaccttcaatcccgaaggctttttttatgcctttaaaacgaaaccaatcaaaggaggtgcggagtatggattctccccattcgagtcaatctgaagaagtacccatatactatgacagcaagacaattgattacacgatgaggagacgaactgccgcaccttctggcgaggccggcacgtctccgtagaggaggtacgagtcccgatggttcaaaacatgacctatgacgaactcattttacgcatcattattttactgcgagacgggaaaatcagggatttcagaagtgttattgatgagcttcagccctatgacatggcatttatttttaaagaaatgccggaaaaacaccgcgcccgctatttatcttatttaactgtagacgatatcactgatatgatcggggagctggaacgcgaatttcagcttgtcgtcttaaataaagtcggaaaaacaaaagcaacactggcgatgaacaaaatggacaacgatgacctcgctcaattgcttgaagaaatggacgaagaactgaaggaacagcttttatccagcatggaagcgtcagagtcaaaagctgtacagctcttaatgaattacccggctgattcagcgggacgcatgatgacaaaccggtatgtgtggattcctcagcattacacggtaaaagacgcggtcgtcaaactgaaaagcttcgctgaaatagctgaatcgatcaactacttatatgttattaatgaaagcaaacagctggttggggttctttcctaccgcgatttgattctgggtgaacctgaagaaaaggtgcaggatttaatgtttacccgcgtcatatcagcagatgctcttcaggaccaggaagaagttgcccgcctgatagaacgttacgattttttggcaataccggttgtagaagaaaacaacgtgcttgtcggcattgtgacggtcgatgatattatcgacgttgttattcgggaagctgatgaggattacgaaaaatttgccgcttccggtaaagacatcacctttgacacaaaagcttacgtggcggcataccggcgcctgccatggctgattttactcttgtttatcggactgatttcaggaagcattatcagctattttgaagacgcgctgaagcaggttgtcgcgcttgcgtttttcatgccgatggtgtcagggatgacaggaaatacgggaacacaatctctcgcggttgttatcagaggtttgtctaaagaagaaatgaacaaaaaaacgattgtgcgcctgatcttccgggagttcagaacaagtatttttatcggagcggtttgttctgtgctgattgcgattgtctccatcatatggcaggggaatgcgcttttgggatttgttgtcgcctcttcactgttcttaaccttaatcatcggcacgatgtcaggaacgattatccctattattttgcacaaactgaaagtagacccggcgattgcttctggaccgctgattacaacgttaaacgatattttatctttattaatctactttggcattgccactgcattcattcactcattataaacgtaaaaagtccgtctcaactgagagccggacttttattatttaacggtttttgtaccgaaagtgagcattaagctgcccctccagcatttttttccgcacttgcggatcgttttttaacatctgttcttttttgcgcatatcctttaaaatctctgccgtctgtacgccgtcttcacgtttattggcgatatccatcagccgctctacatcagcaaaggagtattttcttgtcccccttgaagaacgctgcgggtaaatgagctttcgttcctcataatacctgatctgtcttacggacaatcctgtcaattcactcacaattccgattgaaatcacttttttgtctttataagaatgatcttctgtggtcatttttccacccctggatgtcttttgataatagtatataaaaaacaaagagaaaaaacctaacgcttgtcatattttctaacatcaaatagaagatttttgaaaaaatacggaagaaaaattaacaagaataatgcgtaacacccaagcacgttttatcctttatgtaacgaatcaaacaaggaggaaggataatcatggaggaagaaaaagcggtctcactggcaaaagaaattatagagttggatatcaagcgtgatgaaatgctggagacgtttatgcagcttgccggagaacaggcttttcaattattaagatcggttcaaaacggacaataccgaaaatcttcgtaaacataaattctttacattagattcataccacgttcatttaaaaagagtatcttttgtataggatacctcaaaatgaaggaggacgctatgagtaatttattgaaatccgctttagaaaaagaacgacgccattattctgaaaaactctatcagattggggtttataataaagaggtcatgaacaaaatgacgatttctgagcttcggaaagaatacgcttatttctttcgaagcattacaaatcataaaaattatccttatacaagataatgtataaggatttttttgcttttagaaggaatttctcgaattatagcgaatacgtatagtaagggactgaactcttattatatgtaagggttttcattatttttttataaaaatcctatatacgaggtagatatgatgagattatcgtttaacgaagaagaagttgagcgtgcgatgaatttgtacagagtttttgcaagggctttcaaaagtgtgtccgaacatagtatccgtgatagcaaagagcacggttttaatcccactgaatttgctgtactggaactcctgtacacaagaggcccgcaaaaattacagcaaattgggtcgagacttctgcttgtaagcggaaacgtcacatatgttattgacaaactagaaagaaacgggtttttagtaagggagcaggacccgaaagataaacgctctgtttacgcacatttaactgacaagggaaatgagtatttggataaaatttatccgattcatgcactgcgtattgcgagagcgttttcaggcctttcgcctgatgaacaggaccagctgatcgtcctgctcaagaaagcaggcatacacagccagcatttgctgtttcgttaactattctacactctctgtttcaggagagtgtttttttgtttcataagattctttttaaaacatcttcaatcttcctatcagacatttcgccaaggtatccattgacgtgttttttatactccttcatctgttcgttcgattgaaaaaatgccgcgatatactcttctgctttcttcatgtcccagtttctcatatctgtgacgagtttcctttcatgtagaaggtttaaattcatttcctcctgtcccggcagtgcatgataaataaataccggaagccgtttctgtaagcattcactgatggtcacgcctccgggtttagtcatgatgcctgtcgcctgttcgtacaaacggttcatctctgctttgctgtgaaggtaagaaatcgcctcgatcaaggggtggtgtaaacttttgacataggagtagagcttttcgtttctgccgcataatattttgtataagatctttccgcctggcgacagttcctgcacccattttaaaatcccaccgacccccatactgccccctgtgatgatgatggtatatggcgggtggtgctgcaaggtatctgctgattccattgcaaaatttcggtgaactggaatgccggtcaagtatatgttgttctgatcgatcccctctgatattagctgcttctttacttccgtgctcggaacaaaatggtaatcaatgttcttccgtccccataattgatttacgaaaaaatcagtgtatacattcacaaccgtcagattcggatattcaggctttaatcggttcagcagataagaaggcagcgcatgtgtgcagaaggcgatatcaggctgtttttcttggaggatgtgcctcatttgctgtgtgaacagccattcgtacatgaaatagcgtttgtcatgctggaattctccgcaggcgaggagcctgtaaatgccgctgtacgttttcgggaaatattgaatccattttaaataagccacggaggacaatttttctaaccggctatacgcatgtgaaaagatatcaatcttttcagctgccagcccttgagactctaattcagcctgcaatgcatcagccacatgatgatggccggtggaaatgcttaaaaaaggaaaaatgagaatgtttttcatgacagtcctcctaaaaaaatatggcaactatattttgaggagaacgttcacaaaatataagggtgtttttgatcataaggaaggtgaaaagatgaaaacttgtttcctttccatatggagagtggttgacccgatttatttctttttttcaaggctaagcttgattgacaacgatcaaaaaagcgtttttcgagtcaggctgacgaagtataaaggacatcatgtcgtgcttagcgatggaacgcatattagaaaaaatgatgtgctcgttaaaattcatctgcataacataaagctgatcagggagcttcaaagcattgagagcgcagtcagaaagggaatcattatttatcagaaagtatatcaatcgatgccgcttcttcttgactatatcaacaatcataaaaaaagcgagaaaatcaaaggaatcattgggattacaatgcttgacaaaggtgtggaaaggctcggctttgatgtgatcaccccggtgaatcctttttacagatgctttaaaaaagtgtcccatgtgccgattttatatttgacttcaaagcctgtgagcttgcggcatttaccgaattcatcctatttgtttatctcaaaagaaaagctgcagaaaacctatcaaaaaaaagactgatgcctcggtcagcacagtcttttttgattaaatctgatgaaatgtcacttcagggcggcttccaacacggatatttacgccggtttgtcccaagccctcgctgatataaaatggtttatcgtgatgataatgaaggcctttaatcatgttcattcgcacgagcttgcccattttcaccaaatgatacggttttggccagtgaatttgcccgccgtgaaaatgccctgacagcaggtaatcataatgaacatctttcatatccagaataatatttgggtcatgtgttaagacaagatgatagccattttccagactttgataagagccggtgatattactccgattcgtactgtaatcatcaatgccgataatattgactggccctgcagccgtctcgattcgaacatgttcattttgcagcgtgatacagccgttttcctctaaaactcgcttcaatctctgaaagtcctcttcttttaatacataatcgtggttaccgaacaccgcgtacattccatatgcaggcttcagcttttgcaaggcgttcaagtaacctgccagcttcggaatattacgtttccgatcaagaaaatccccggtaagagcaatgatgtccacaggctgatcttttgttaaatgatacagctcctcaggtgagacagaaatgttttccaagtgaagatctgataaatgaaggatatttaatttttttctggctggaaggccgtctttttggtcgattgaaatggtgttgactttcacatcttttgtattgcggttcgctttatatagaaatggcacaaatacgagtatggccaatgaaagtaagattgtaaacaaaatatatcccctcccttctatcagtatagtaagtgatcaagccctatggatagcgggaattaatgggtagagacaggttgaaaaacggattgtcatatgatgaatgatttggaagggaaaagggataataaattttgacacatgaggcagaacatgccgacggagtcagaataacaaatggatgtgtaagcaatgttacgattgatgagacaacaaaaaaaagaaacatattatctctggatcgcattatttcttcttttattgtatgtatccccgctttttattttaaaggaagatgcccatatccgggtccacgataatttagattccaacatcgcttggtacaaggttctggccgatagcggagaaatcgtcggcaaggttgacgctgccattccgcaaatcattaacgggctgccccgggatgcctttggcaccgagtggagcggaattgtttggctccatgctttcttttcttccatgaccgcctatgcaataagccagacggttacaagagttgtcgctttttttggaatgtatgtgctgctgaagaaacatataatcccggaaccaaaagcggctttcatccgaattggcgtatcgcttgcatttgccttaacaccgttctggccttcgggaatgctgagtacgcttgggtaccctttggcactgtgggcttttttaaatatccgaaaaggggatatctcatggagagagtggctgacgctgggcttgctccctctatactcaagctttgttctaggtttcttctttttcctggcagggatggcgtgtttttggctgtatgatgccattacaaaaagaagatggaatttgatgttcttaggcagtattgcatttatgacgagtatctatcttttcgttgaatatcggcttgtctattcgatgctgtttgagcacgcaccgatgcatcgtatcgaatttatctcatccaggcatgacgtttggcattctcttcggctatccgtaaaaaactttgtctatggccataatcatgtgatgaccgttcataccgttgtcatccttccgatcctgctggtcgtatttgctgctctgctgttcaaacgaaatcggacaaagccagaaaatgtgtatctgtttttatgtgtgcttaattacggattgtcattatggtatgcgttttggttcaacaaaatttgggctgttccaaagcagaaatttgcctttttagcagaatttaattttgcccgttttcattttcttcggccgcttgttatatacgtgagctttgcgcttgctttatatctcatttggcggatggggaaaggatggaaatggcttgtgtacgccgcagtcgctgcacagctgatggtgttggcgccttttaatgaagaatatacgtatggcgttcattacaacgcgccgacattcaaggagttttatgcatcggagcaattcaaagagattaaggaatatatcggacgtccgcaggattcgtacagggtggcgagcatcggactgcatccgtctattgcccaatataacgggttttatacgttagatacgtataacaatctgtatccgctttcatataaatatgaatttaggaaaatcatcgaaaaagagctggaaaaaaattctcggctgaaacaatactttgatgaatggggcagccgctgctacctttttgtcgatgaactcggtaaacgatatgatttcaaaaagaactcgaagaaaacgatcaacaaccttcaattaaatacagatgtatttaaaaaaatgggcggacggtacattttttcttctgttccgatcatgaatgctgaacaaaaccatctcgcgctcgtaaagacgtttgaccataaagattccgcctggcgcatttatttatatgaaacaagataaggaggatatcgattgaaacagtcacagccagtattaaccatcgtcgtcccgtgtttcaatgaagaggaagtgtttcaagaaacaagccgtcagctgacagaggttgtagatgatttaattgaagaaaaattaattgctgaagacagtaaaattctgtttgtcgatgatggcagcaaagaccgcacttgggctttgattgctatggagagcataagaaacaagaaggttaccggcttaaaattagcctgcaatgtcggccaccaaaaagcgcttttagccggactgcataaagcgaagaataggtcagactgcgtcatttcaatcgatgctgatcttcaggacgacatctctgtgatccgggattttatgctgaaatatcatgagggctgcgagatcgtttacggtgtacgccggagcagaaaaaccgatacctttttcaagcgcacgaccgcgttagggttttatcgtctcatgaataagcttgggattaaattaatttataatcatgctgattttcgtttaatgaataaaaggtccctcgaagagcttgagcgttatccggaagcgaatctgtttttaagaggtattgtccccatgatcggctttaaatcggccgaagttttgtatgaccgcaaggaacgctttgccggcaaaacgaaatatccgctgaaaaagatgctatccttcgcttttaacgggattacttcattcagtgtcgcaccaattcgattctttacgcttttagggtttgttttgtttttcctcagcgctgtggcagggattggcgcgtttattcaaaagctgctcggccatacgaatgcaggctgggcgtctcttatcatatccatttggtttttgggcgggctgcaattgatgggaattggaatcatcggagagtatattggaacaattttttctgaagtgaaaagacggccgaaatacgcgatcgatattgatttgtataatgaacagctgagcccgcttcagcgccaggaaaaagagcggttagaaaaaaagtacagttaaacacggaaagagctgacttcattagtcagctctttttcttcaactgatgcaatatagcgctaagcggttcgtcttgcgggttgcggtaaaaatcaaaaaatgggcagccctgcttcttaattcgatcgatgaccgtatcaattgtaaaaagagcgggtgttaaagatgattgcacctcatgccagtagagcggggctgcaacagtcccaagctcatttcctctcgtcgaatagggacagataatcgtttttccttctgcatgctgcaaataatcaagatacaatttgccgtgtctgtttttaatcaagcgttcagtggtaaagagctcgggaaatgcattggtgcagtactctgcgatcagctgcgtaaattggcgtgtttcttcatacgtaaatgcctcgggagacaagggaatataaagctggattcctttgttgccggacagcttcgggtacgatgtgatgccaaaggaatccaacagccgcttcagttcatttgcggcctgcacggccataagaaagtcatctcgcgaaggcgggtctaaatcaatgacaatctcagccggacgcctgcttttaatggtttgaaaaggaacgtgaaactccaaagcaagctggttgcaaagccatagcaatgtagacatatcctcacagacaatatgttcatggcttccatcatagaaggactgaacaaaatccggcgcatagtccggcttgtttttttggaaaaatgattcgctcctagatccatgcggatagcggatgacggtgacagcccggtttttcagaaatgggagcaggtagtcactgacttcaatcatatactgaataaaatcttcttttgtttttttattcttttcaaatatgattttatccaggcttgtgaactggagttttgggtgaaccggtttggagtgtcgtatgacttgcgcatacgtgcattcggtccagtccatttggaattcgaaaccgataaacgatacctctcttaatgtgccatggagaattgttaagtattgaacagctgcacaaatcgaaggttcaagcttaaactcgcctgagggtgtttgatgtccgtgctgttccataatctcgcgtatagcgcttttttcctcatcgcgcattccgtgcgagacagaggcaatcggtgtcattattccgttttttaacaccgataccgtcagaaacccgttgttagggttgaaccctgttatgcaaacataagcttgtttaaagtttttatatttgagccaatcggacgaccgcttcttttcaagccatttgctgtttgttttcttcgctacaattccttctccgtcatattttattaccatctcccagagttgatcaaaatgatcataacagggaatggattgaatggtttcttttgcgtaaggatctggagatgcaggaagctttgctgcggatatgagttcacgcagcgattttttgcggtccaaatacgaaagaagcgttacatcttctccgcttcgctctaacaaatcaaaggcgagaaagcagcacgaccgcgcgtttgccgattcctgaatcttgtctggccttttcaaacgcccccgcacttgaaggtgttcaaaatctgcacgacagggattcaccaaacatacgatttcaccgtcaagtgtcagcggaagctctttttctaggtgctgaaaggcagttttggcgaattgtatgatttcagggaaggtgctgctgagctccacaccatttctgctggttaaggtcacacctgaagaatggatgcggagaatacagcggtacccatcatattttacttcgtaacgccattctgctccgattggcggtgacgaagttaagaccggctgcatggtaaacgccatgcgctatgatgtgccggaggctttttttctagttgttttttgttttttatctccggctcctttcggttcagcggcttgtgcaggtgcggcagccggtgtctcccggttcggccttctggttctgtcgatgctggcttgcagagcgcttaccaggtcaatgacatcttcacgaggtggcgctttatcaggagtgacagccgtttctttattttctagcttgtcgttgactctttgcagcagcgcctgtcggtacgtgtcttcatatttctcaggctcaaacttagcagtcagttcatctattaatgtgatagcagtttgcagttccttatcgtttacattcgattgatcatgtacacctgggacttgagcggcgcttctgacctcatcgggataatggatagactccatgacgatacaattttcataaacgcggagaatcgccagctgctgctttgacctgattgtcatattggcgataccgatctttccggttgagcgcagcgcctcacgcagcagggtataggccttcgtcccattatccccggggccgacaaagtaggagcggttaaaataaatcggatcaatttcctgaagctgaacaaagtcaacaatctcaactgctttctcctcatgctcctgttttaagctttttaaatcttcgtctgtcagcactacatattttccttttacatattcatatcccttcacaatttcatcaggactaagagttttttcgcaatttgtgcaaactttctcgtatttgattggtgcgtgatcctctttatggaggctgcgcagtttaatatctttatcttctgtggccgcatatagcttgatggggatgtttactaatccgaagctgatcgatcccttccacattgtatgcatatcgataaacccctttttttctttagtgtgaagagaaggagtacgattcatgtgtagtaacttatgggtgaaaaaaagccggcgctgttattgcgacggctgttcaataatgaattgttcgaattgttccggaggtattggcctgctgaaaaagaagccctgcaaatggtcgcagcctttttcaaaaagaagctgcttttgagctgcattttccacaccttcggcaatcacctgcaaagacagctgatgccccatggcaataatagctccggtaatttgctctgatttaggatgggtctgaatatcgtcaataaatgatttgtcaatcttcagcctgtgaatcgggaagtccttcaaatagctaagagagctgtgaccagtaccgaaatcgtcaatactgattctgattcctaattctgttagggatgacaaaacctttttggagtgatcgagattgtccattgtcatgctttccgtcacctccacttcaagaagctgcggaggaagctggtatttattaagcgtatccttgatgaggggaatcagatctttagattgaaactgtctggcggaaatattaatggcgacagaaagatcatagcctttgtcatgccaaatccttgcctgcttgcatgcttcatctataatccactttccgatatcaataataagtcccgtttcttctgcaacaccgatgaattctccgggcggacgcagttgcccgtctggtgtcacaaggcgtatcagtgcttctgctcctgtcattttttgttttttcacactgaattgcggctgataatgcaagacaaatctatcgttttcgattgcttctctgagtaccatctcttggttaagcttaacggtttctttgttgccgattgaaaaagaatagtatctgtatttgcttttgtttcgttctttagccgcatacatcgccatatcagcctttttcatcaattcaaggccatccgtcccgtcttttggagatatcgcaatcccgatactgacagatgtgacaagggtgtgatcttgaattttgaaaggttttttgaatttttggataatttttcttgctaaaacatctgcttcgcctgttcctgtattggcgtctgttaatataataataaattcatcaccgccaagacgggcgataaatccgttatcagggactacagatgacaggcgtttagctgcaaactgaagcaattgatcaccgacattatgccctaatgcatcgttaatcactttaaaccggtttaagtcaagaaagaatacaacagtgttataatgcaaggaatgctcgcgattcagcacctttgttagatgagagatggcatgccttctgttaggtaagtctgtaagcgaatcataatgagccattctatggatttctttttctgctttgtactgcttcgtcatgtctttacaaatgacataaatgctgtctagttcctgattgacctcaacaggtataagcgtaatatttaagtgaaactggcctttttcagtgataagatcgctatcgctgttcatcgcttgtttatcttttttaacttgctcaaaaaggcgcttaaccttcagtgatgtgtaattcctccagtcatgcatgctgaagccaaatttgctgatcatttcctcaccagcgtgattggaagatattatgtctccttctaatgataaaataaaaattgcatcaatattgtggacgattaaagactgaaatcgctgttcgttatcctttatgcgttcgctctgtttaataaactttcgatctgcatgggaactgaataacaataacgtttggatacaaaaaataattaaagtaacaaaaattgaccaatgaaacgtttgcacctccatatggcttccgggcggagccatgtccttatggaaagttgccgcaagcatccctgtgtagtgcatgcccgaaatcccaatgcccattacaattgaactgacgactttatagaatataagatgctcagaatgtttttttacggccaagtcaaagaatatttttaacgagacgaaagaggctgcaatcgcaatgataattgaaactgtaaataaaatcggttcgtaaataatcattacccgggaaatggcagacattccgatatagtgcatagaagcaatagatgcgccaagcacaactgatccggtaagcagtctgtaatatgtaagaatgtgccggctgacaaaatataatgacacaaatgatcccgaaacagatgcgccaatggctgccattaaaggcatgaattcatattccatcggcatttccatatggacggccatcatccctacaaaatgcattgaccaaataccgaatcccataataagtgagccgccgatcagccaaattttactttttaagcctgtattgatggtgactttccttgaaagttcaagggaaatatacgaggcggtacaggcaattagaatagataaacatatgagagtcgtattatatgtaacgtgtatttccaaatggagattccccccgtatcgtgtgttccagtcttgttgactctctttattatcggctgcttaaccgcagagtttcagccttcaaaacgatagaaatacgagggagatctatttttagttcaactgaccgtgaaaaatgtgttaaaatcatcttgacgttttccgaaaaaacaaaaatgtataatacataaacatgaaacaagggagttggtggctatcgaagagctggttatgtcatggatagaagcatttaaaagcttatcttattttggaatatttctagcgctcagtattgagtttatcccggccgaagtcgtcttgccgcttgcgggctattgggtatctaaaggcgatatgacacttgccggcgttgttttggcaggatcgcttggaggagtggccggtccgcttacgctgtattggataggccggtacggaggaaggccgtttcttgaacgttttgggaagtatctctttattaaacctgaagcgcttgataagtcagataaatttttcaaaaaacatggtggctttgtcgcgttcagcggccgtttcttgcctggcatcaggacattgatttccataccgtgcggaattgcaaaaatgaatgtttgggtgttttcgctttatacattcattgctatgcttccgattacatttgtatatgtttatctcggtgtgaagctcggtgaaaattggaaggaagtcggctctattcttgatcaatatatgcttccgatcgggatagccattttggcgcttttcctgctctacttactgatgaaaaagaggaagaaacgcacgcactccgaacaattatctgtatttttgaaaaataaacgttgacaaatcattgcgctgcgcatatcattgacgtataaaatcatatttcttgaaatcccaaaggggagtagcgtccggaatgtattccggaaacaaagtcgtcatttcatggattgtatccatcggctttgttggcatgcctgaattcatgtctagcaagacctttgccttatgtcggcaaaggtcttttttgcatggtccggccggcataagatcggatgaagagaaagaaaacaacttttttgggagggtatcatttatggatgcagcattattattagagtatggttgggttcttctcgtcttgatcgggctggaagggattttagccgccgataacgcgctggttatggcggtaatggtaaaacatttgccggaggaaaaaagaaaaaaagcgttattttatggattggcaggggcttttgttctgcgatttggctctttatttgcaatttctttcttggtcaacgtatggcaggttcaagcgattggcgcgatctatttgctgtatatctcagcaagccacttattgaaaagatatgtatttaagaaagaagacacacataaagagacgaagcaaagcggtttttggccgactgttttaaaagttgagctggcagatatcgcgtttgctgttgattccatcttagcagcagtagcgctggcggttacacttcctgggacatcactcccgaagatcggcggacttgacggaggacaatttctcgtcattttggccggcggtatcatcggactggtgatcatgcggtttgcggcttccatgtttgtgaagttattaaaggaacgtccaagcctagaaacagcagcctttgtgattgtcggctgggtcggagtgaagcttgctttatatacgcttgcccatcgcgacatagcggttgtttctgagcactttattcattctggaacatggaagctgatattctggggtgtcttagcagcaatcgcggtttgcggctggtttatgtcaggtgggaaaaaacagccggagggcgcacaaaacgaacaaagaaacagcacccgtgaacgggcgtaatctgaaagactctgcttaaaagcagagtctttttgtgtttgaagcgttttcataagcgaaataaaataacatttttataacatctttgttacaaaaaacacgcataaaacccccttaattctttagaaaggcacgaaatcatgtataggacgtcagaatggtttgtcataattgagacattggaaatcaatatttctttttctcctttgcgaatccctatcaaattagctatcattaatgagtagttatagggaggaactgaggtgaaaccagtgcttagccttttgtttaaattgggaaaaaagaagcaaacacttgaaaaagctgttgagagtatacaaaaaggcaataaagatctgcaaaatgaattaatacagcaatataagccatttatcgcaaagacggtttcatccgtttgtaaacgatatatagatgaaaaagacgatgagttcagtattggactgatcgcgtttaatgaagctatagaaaaatattcacctgaaaaaggaaattctctgctcgcatttgctgagcttattataaaaagaaaagtcattgattacattagaaaagaagccagaagcgcacaaaatataaatatcgatttacaggaaggagacgatcaggagtcatcacaaagcctgattgaagccgagctttccattgatgaataccgccgtcagattgaacaggagcagaggcgggaggaaatcctctattttcaaaagcagctcaaggattatggtttatcgtttaaagaactgcttgaaaattctccaaagcacacggatgcaaggcaaaacgccataaaggtggcaatgacgcttgttgaacatgaagaattggccgctatcctgtatacaaagaagcagcttccggtcaaacagcttgaacagcttgtctctgtaagccgaaaaacgattgagagaaacagaaaatatattattgcgatgtgtattatcattacgggtgattatatttatttaaaagattatcttaaaggggtgctgcactcatgagaagagggattatagtagagaaaaataaaaaattcgtcacgttgctgacccctgacggacaatttttaaaagccaaaaatgatcgacacagctatgaaatcggagaagaaatcatgcttccgagtgaaacacgcatgggcagaagggccagcttttttgatttttttaaactgcgccctttcaaaatggggatttttacgatgactgctattatgctctttatttttatagttctccccgttttttctaataataaggcctatgcgtatatgacaatcgatatcaatccaagcgtcgaaatggcgttaaacagcgattatgaagtgattgaactgacgcctctaaacgatgagggacagaaagtcgtgaatgatatagatgattgggagaagactgattttaaaaaggtgattgacgatattataaccgactgcagtgaacacgggtatgtaaaaaaatcgaaagaaatattgatttccactgtttatgaaaacacagaagacaatacatataaaaaggctgtgaaaaaacagctgaatgatgtgactgaaaaatataaaacgacataccgcatggaatctctcgagtcagatatgcaaacgagggaaaaagcgaagaaagaaggcgtctcaacaggcagctacatcaaatcaaatgaaaagaatgacaataaagatataaaagatgactccagcaaaccatccggggaagaggatcaaaagagtgatgaaaatgaggatgaaaacaccgatcaaactgacacccaggacagcaagcaaggagataatgaacagctgaatgatgcggattccggagaccagaaagaagagaaagcggatgaccagattgatgatagtgacaaagataaaaaaataaaggaatcagatgaaaacacaaataccgaaaaagatggggaccatgagcaaaccccaatacaagatcctcaagataaaggaaatgaaaataacggcgttgacaagggccaaagccaatatcacagggactggaacaatggtgaacaaggcaagaaccgttcttcgtccagaagggataacgcttcagaccgacgtaatccaaacggctacagcagtgataatcattcagctaaaaatgaagattcgccgagtgcccccggcgaataaagacctgaatttatttagttgtgccatttaattgtgattgtgcttgctgtaccagccgctttgtcatttctccgcctacagagccgttagcgcgtgcgactgtatcagaaccaaggttcacaccgaattcttgagccacttcgagtttaaattggtcaagtgcctgctccacccctggaacaacgagtttatttctgctcgccatctttttcatctcctttttcgataaagaaattcttaacgcgtatttagtttgaaatatacggggtttatttatgctggcaattgttgtggagaaaaataaaaccccggcctctgagccggggtggcgcagactatagaatgtctgctgtcattttatgtgcggttgcctgaatatggaatgtcaaaatggagaggactgtaatggcgataatctgtctgattttaagccattggctgtcattcagttcttcaaaacggtgacggagacgctctgtctcctgttcggcgatctcctgcagatttgattctttcatagaaggagtatcttggtgatggatggcatcaagcacatatgcgcagctttcataataagcaatcgggctgatgacatcatcagatctgtctgagattgtgttaaaggccacttttaaaatagctcgtatgtgttcaaagtcataaatggattttaaatcacgtacaattaaaagaataactgcctgttcaattgagtattttttgcctagctcagggtgtccgatcagatctttgatatcacgctttacccagttttgaatcgcggttgactttaacgaagtcagctcgcataagttgccaagctctacgatttcatttgtagacagtccgtattcttttttctgtttttttcgttcatatcttgtaagaaattcaggaatttctagatgattggctgctttttctgctgacatgttcgctgattggacgagaatgtcgagcgggctatgttctccttgtccttttagggaatagagcagccgcaccatatcggttcgagagagtttaaaaatgttcattgttcacctctttaaacaatttgacgcggatataggtctatgtataagttcaaaattcaagcgtcagcaaattacattaacatcatacgtcgaattccttgcattttcaaatggatgttttataatttaaatatacgggttcttttgaacttaaaataacggaggttgttatggcgaaaagaatttttctgtttattctaacgaatattttggtgcttacaacaatcgggatcgttttgtctgttttaagctctgttacaggagtcgggacgtactttacagctgatggcggtatcgatccaatggcgcttcttgtgttcagtttagtcgttggatttgtcggttcctttacgtctcttgcgatatccagatggatggcaaagacgatgatgggcgtcagagtgctgaatccgaaaaaacactcgctcagctatgaggaacagcaattggttgatcgtgttcacagattaagccgctctgccggtttaacgaaaatgccggaagtcgggatttaccgttcacctgaagtaaacgcgtttgcgactggaccgtcaaaacgccgttcacttgtcgcagtatcgtcagggctgctggagcagatggatgacgcagcagttgaaggtgtgcttgcccacgaggtcgcgcatattacaaatggtgatatggtaacaatgacgcttttacaaggcatcgttaatacctttgtcttctttttatcgcgtatcgccgcttggatagcaagccgttttgtcaaagaagatctagcgccgatcgttcattttattgcaataattatttttcagattgtcttttcgatacttggcagcctggttgtgtttgcgtattcacgccatcgtgaattccatgctgacaggggaggagcggatcttgccggcaaggacaagatgattcatgcgctacggacgcttaaaagctattcttcccggattatggaagacgatcagacagctgtccaaacgttaaagattaatggcaagaagcgctcttcgcttttctctactcaccctgatttagatgagcgaatcaggcggctggaagctaaataatacaaacacattgttcctctgagagaattctcagaggttttttattttatccattgactaaaatcataaaaaaataagcaagttaagaaaatgtttcgtaaaagcctttaaaaatggacctaatatctttagaataattaccgtacttaaaaagagaggcagaaggattttacatgagattaaagtttggaaaattgatacaggccttgtcaccggcccagctgatcgcattatattattttcttgcagttactgtggccgttatattgctgagtttgccggcggcccataaaccgggggcggattggacgtttattgatgcgctttttacagctgtcagttcagtcagtgtaacagggctgacagttgttgatacagctgatacattcagcacaatagggatttttatattagcatttgttctgcaatttggcggaatcggaattatgacgctcggaacattcatttggctgatcatgggaaaacgtatcgggctgaaagaacggaagctgatcatggttgatcaaaaccaatcccagttttcaggaattgtcaatctgatgaagcaggtactgtttctgatcttgtggattgaattttttggcgggctgattctcggcacatatttcttaacctactatgactcctatcaggaagcttatttacacggattttttgccagtatcagtgcaacgacaaacggcggatttgatattaccggtaattcgatgattccatttcgccacgattactttgtgcagtttattacaatgcttttaattatatttggagcgattggatttcccgtgcttgttgaagtaaaggatttcctgttttcaaagcatcggcgttatccatttacgctttttacaaagatcacgacgattacgttcggctcacttgtcttgtttggagccattggcatctttgccctggaagcaaaccatgcgttcgcaggaaaatcatggcatgatattttgtttttgtccctgtttcaatcaacggcaacccgaagcgggggactggcaacaatcgatatcagccaattatcagattccacactcttttttatttgtgcgctgatgtttatcggagcgtcgccaagctcagtcgggggaggcatacggacaacgacttttgctttgaaccttcttgcgctgtttcattttgcccgcggcaataaggccgtaaaggtattcaaacgggagcttcaccctgctgacttgatgaagtcgcttgttgtcacgatgatggcgatcctgctcgtttttggcgcgacactcattctgaccattacagaaaaacattccctgctggagcttttgtttgaagtgtgctcggcattcggtacaaccggcctgtcgcttggaattacggcagatttgagcagtgttggaaaatgcgtcattatgattgtcatgtttatcgggcgaatcggcatcctaaccttcctgtatctgatcggaagaaaggaaattgaagcgaactatcactatccgaaagaaagagtgattatcggataggcaaaacaccgcatactttgcggtgttttttgattgccaaaaaaaagatgtgtgcctcctgttcagttggagaacctaacttcgacaggtgcaatttacgctcctgcatcttaaaatgtctgaaaactggcgaggaggattcgtatgaagcgtaaagctgaagtgaatgaagccattaaaaataacaatacacctaccgagagcatggaccccaattcatataagacacaatatcatgacgaccccaattttagaggggcaaaccgcaattccaaacagggccagcagggaggcatgtagttgtgaagaaaaaccgtcatagcagagacatgcaaaatcataaaaagcctatgaataaaaaggtgctggaggaagagttctcaagtgaacttggggattacaatgccgggaagatcatcgaaacgctggaagtcaccaagcctgaaaagaaaaaagaaaaaaacaaaaataaaaaacaaaaataaaaaagacctcttaggcggcgtccgcttaagaggtgctttttctattttaaataagcatttttgcccgttcctctgacaaattgcaataagctggtcatcctcagctcaatgaagggctgagcgactgtcttaacaaagttgctggagaggactgatgtcagggctgctgttaaaagcaagaggatcactaagctttgatagtcagtaagccaatcctcaagcccgacctgtcgtaatgtcttaataataaacccgtgaagcagatacacgtaaaatgtccgggttccccatttggtaaagaaataccgtttttgcggaacaagcgctaaaaagctgaaggttgccccaaaggcgagtacataccagccgattcgggatagtccgcttaccagggtaacgtctccaaatgaagaatacggttttgaaccaaacagaaaagaatagtcaaaatcgatgccccagcagatgacgaatactgcggcaagcactccgagcgcaatttgtttgccgcgttttgatctcaataaatcaaaatgatgtttatttaaataaaaaccgacaaggaacatcggtaagaatacgaatgtccgtgacaagctcagcgtgctgctgacaaagtccagataaccgatcagcacggcgattccgcagctgacaaacagcgcccactgctttgaaagctttgaaaaaggatataggagcaggttccaaaagaataagcttacaagaaaccataacgaccattgcggatcaatcgggttcacatttgccatgctttcatcttgcataatgtaataaaagacggaataaatgatttggaaaatcaaatacggaataatcagcttgaccgccagcttttttacatatcccgcccgtttaaagcctttcgcgaaataaccggatacaagaataaatgcaggcatatggaatgtgtaaatgaacttgtagaggtagagcataaaatgattatcattaataaaggaacgaaggatatgaccgaatacaacaaggaatatcaataaaaattttgcgttatcgaaataactgtcccgcgatttactcatagcatcaccttctctttcatcagtcactaagagattattccctgctggtacatattttaaaataaaagatgaaaaaggaatctaaaaaaatgctgattgttaggtcgatgtaaagtgatggtaaggatcgtagaaaatgtcttcgtaatgtaatggcgctgaaattttctgaaatttatagggcaaatgaaggaagttcccgcattttgtagaaatattgagggataggttttgaagaaggagtgtacatgcatggaaactcttggtgtccagacaaactcggagctgcgagaggaactgaatcgcctcaaagaagaaaacgcgcgactgaaaaaggaattgaatcagcatcaagtgattgtcaacaatacgctcgatgctatttttatttgtgataacgaaatgcggattgttcaggcaaatgaagcaacagaaaggatgcttcaagttgactcggaggatttgaaaaagcgttctgttttggattttttgttttcaatcccaaaggatgaactgaatctttccgtaaagaagttttttaaaaaaggctttctgtggaaggaggttccgatcaggcttgattgcggggcaacaaaatacatagagtttctggccaaaagaggtattggcgaggatttcttttttgttgtcatgagggacatatcttctaagaagattctggagcgggaattctctatgaatgaacagctttttaaggacttgtttgacagagcagttgacggaatcgtcctgtttgataaagatggcggttttattgatgccaatttgtccttttgtaaaagctttgaaatcaatcataatgagctgtctcatttatcgttgtatgagttcatagacagcggctcacgaaaagatttcgacaatatctggaaggcgctcaaccgcaagggaaaagcgaagggggagctgcctgtcaagcttcgttcaggagttcaaaaactatttgaattcacgattacatcaaacatcatcagcggtttttatatgtccattatgagggatatcacagagaagcggtctatggagctacagctctttaaaagtgaggagcgcttcagagaaatctttgaaaatgcaatggacgccatcatcatctggtcgaatgacggaagaatcgtaaaagcgaatcaatcagcctgtaaaatttttgagctgccgatgaatttgctgttgaaaagaaagctgtgtgattttctcgttgactcgcagcagaaatacagcataacgaagaggaaatacgcaaaatacggagagatcagagaagagctgctgtttcaaatggggaacggccaattcaaagagcttgaatttacttcaaaacggacaatccttgaaaatcagcatttgacgatcttaagaaatgtaagcgacagaaagcggatggaaaaggagcttcgggaaagcgagctgaaattcagaaaagtgttcaacggctcaatggacggcaatgtattgttcgacaatcaatacaggatcattgacgccaacccgttagcaagccatattttgggactgtcacatgaagagataaaacagcacagcttgttagatattatttctgcttatgaaatagaaaatctggcatcaccggcaaggcagattaattttgatgaaatggacaacgaaattccatttttgctgagcagcggtgataacagaaaactcgaattctcatttaaacggaatattattcaaaatatgaacttggctatctttaaagacgtaacagagcgaaaagaattggaggaacgcctgcgcaaatcagatacccttcatgttgtcggcgaactcgcagccggcattgctcatgaaatcagaaatccgatgactgctcttaaaggcttcattcagcttctgaaagggagtgtcgagggagactacgccctttacttcaacgtgatcacctcagaactaaagcgcatcgaatccatcatcaccgaattcttgattttagctaagccccaagccattatgtatgaggaaaaacatgttacccaaattatgagggacacgatagaccttctaaatgcgcaagccaatctcagcaatgtacaaatgcaacttgatttaattgacgacattcccccgatttactgtgaaccgaatcagctgaaacaggtttttatcaatatattaaaaaacgccatcgaagtgatgcctgacggcggaaatatttttgtaacgataagggcattggatcaagatcatgttcttatctccttaaaagacgagggaatcggaatgacagaagataaattaaagcgccttggtgaaccattttatacgacaaaggaacggggaactggacttgggcttatggtaagctataaaattattgaagaacatcaaggcgagattatggtagaaagtgaagaagggaagggcaccgtttttcatattacgcttcctgtcagacagaatgctgaagaaagaaggaatgatgaatgaactactatacgacagccgagacgccgctcggtgaacttatcattgccgaagaggaggaccggatcactcgtctatttctcagtcaggaagattgggtggattggaaagaaacggttcagaatactgagcacaaggaaacacctaatcttgcagaagcgaaacaacagcttcaagaatatttcgcaggcgaaaggaagacattctccctgccgctcagccaaaagggcactccttttcagcaaaaagtgtggcaggcgctggagaggattccatatggcgaatcccgaagctatgcggatattgccgctgcggtcggcagtccgaaagcggtgcgcgctgtcgggcaggctaataaacgtaacgacctgccgatttttgtcccgtgccacagagtgatcggcaaaaacagtgcgttaacaggatacgccggaagcaaaacggagatcaaagcatttttgctaaacatcgagcgaatctcctataaagaaaaataaaacatatggcacgttcccttttttcacggccgacatatcattttattaagttaaaaaagttggtctgatgaaaaaggaggacaaagcaattgaagccgagccgctctgagaaacttgccgtttttgccgaactgtttgtgaaactgcatatcttatcaagcgctcaaaaagatgaaatcatcaatgttaacaaaaagaaacaaaaaaaccgctgactcggctccaaatgagcaaagtccagcggttttttaatgcaccttttctcctctaaacagctgttcaatctcttcttcatagtttccggtcataatccctttttctgtgatgattcctgaaatgagatcatgaggtgtaatgtcgaaagcgggattaaagacaggcacattggatggagcggtccgaactccggaaatctgcctgacttcctcgggatcgcgttcctctatcgggatatcagcgccgcattcgacctttgtatcaaatgtagataaaggtgcggcgacaaaaaacggaatatcaaaggcgtttgctaaaatagcaagaccgtatgtgccgattttatttgccgtatcaccgttctttgcaattcggtcggctccgacaataacagcggaaatttgtttttccttcatcgtatgggcagccatgctgtctgtgattagagtgacatcaatgcccccctgcatcagctcccaagcagtaaggcgtgaaccttgcaggacaggccttgtttcacaggcataaatgtgtaatcccaaatctttttgtttggccaagtaaaacggagctagcgccgttccatagcggcttgtcgcgattgagccggcattgcagattgtcatgatcctgtcgccttttttgaaaagctgcagggcgttttggccgatcaaccggcacgtttcctcatcctcgacctgaatctgaatggcttcatggacaaggtttgtttttgcttcatttacggaaatcgcgttttcgaccgaatgactcagtctctcaagcgcccatgacaaattaatggcggtaggccgtgagctgtttaaatattgtttgatgtcttccagtctgcggcggaattccgtgacattatctgtttcaatgtttttggcagcaagcgccagtccgaaggcagccgtaatgccgatcgccggagcgccccttactttgagcgtgacaatcgcatcaaatacatcctctttcgtcgtcagctccaaatattccgtctcatcaggaagcttttgctgatttaaaatggtaatagctgtttctttccattcaacagaacgtggaacagcaaatgaatgggtcatgaatagatcattcctttacaagtaacttaaataattcaataacatctgttatcgttttgaattccgaacgtttttcgataaaggctgtgccggtttcgagcgccaagcgttttctgccgattcgtttatcaaacggcacgatcgtatccaggtcagctacatgggcaaggccgatcgtgcgtcgtatcagctcacagcccgcaaatccgattgcttcttcaaaaatatggctgagcgtatcagtgaggtaaccgtcgatgttggcgtaaacatccagactgtccttctgccaggattcactaaacgtctcttcaaacgtttcccagacctttttgacatgttcatataacggctctctgtcagccccgtcacggctgagtgcgttcaaaaataagttggcgataaattgccctacatcaaagccgatcggtccgtaaaaagcaaactcaggatcaatcacctttgtttcgtgctcacttgcgaaaatgcttcctgtatgcaaatcaccatgaatcaacgtttctgcagacgttaaaaatgactttttcagcttagcggcttcgattttaacgctgtcattattccaaagcttttcgacaaaaggacgaagctcttcttcaaaatcatttgtgtcatggtcgaagaaaggatctgtaaaaacaagtctttccgtaatgtcgcatagctctggatttgtaaactgtttaacaagctgttttttcaccttaggttcaagcgcgtaatctgatgagtagaaaagtgtttttcctaaaaattcaccgatgtgctgcgacagatgaggatagttttcacccttaatgagtccttttcttgcgatcttgaggtgagagagatcctccatgacggtaaccgccatttccgtatcagaataaaacactcttggaaccaggtgaggcacatgctcgccctgacggatgagagcgctgctttcgattcttgcacggtcgattgtcagcggccagctttctcccaccacttttgcatacggaaccgcctgtttaatgattaatgctctgtcatgttcttgatcataaatatgaaaaacgtaatttaagttgccgtctccgatctcctggcatgtcagcgtgcttttgcttggaaaaaggccaagcttcaccgccaacgccacagcggagctttcatttaacgtttcgtataaaggtgtttttgtgactcccatcatcataacctccaattatgtaatcacttaatatgtagccgtaaaaaagcctccttctcagagagaaggaggcttaacagtctatgtccgcctctcttatctctcagatcagatctgaatggaattagcaccgtgccttaagagaccagcgtctcggcgcgaaaaagatgcgccccatttcacaatggaattacggtcggttgctgttggggtcaaaaggccaaatccctcgcccaactctcgataagagaatatattcacttgtttgacaattctaatttatcagttgatgaacatggtaacaggtaatttagttagttgtcaatattttttaatataaatcttttctgatatcatcgaaaacaggaatgctctcccgaacttctgcgctttcttgaaggtcgatttccgctcggactatgccttcttcccggccgccttcagcaagtacacgtccccatggatcaataatcaggctatgtcctgcaaattcattatccggatttgaaccggtacaattgcaggctgcgacaaagcattggttttcaatggcccgcgcaataagcaggcttttccaatgatcaaggcggggaagaggccattccgcagaaataaacagcacgttggcgccttttgtcgtatgttttctgatccattccggaaaacggatatcgtaacagatcaatccagagcttttgacgccgtcaagctcaaagtatccgtcttcggaaccggctgataaatacagatgctcatccatcagctgaaaaagatgggcttttctgtactctttaatgatttgcccttccttatccgcaatgtacattgtattataaacatcagaattcttcctgacagcgaccgacccggcgacaatatgaacaccatgtttttttgccgttttcttcagccagctctgagcggagcgcccgtcttcgtcagcgagttcatcaagattggccagatcatatccggtcgtccataattcaggcagaacaagaacatcagcatgtttgctttctttttcgatgaaaaattcagccttttttatattttccgaaggtttgccgtatgaaatatcaaattgaagacaagatatcgtccatttcatctttttaacaccccaaatttttctttacttttttcatttaaccatatatgatgatggactatcatttcaagatttttttagaaggtgagaatagatgaaatttgaacagtctcatgtattgaaggaattgcctaaacaattcttcgcttctctggtgcagaaagtgaaccgaaagctcgcagaaggacatgacgttatcaatctaggacagggaaatccagatcagccgactcctgaacatattgtcgaggagatgaaacgagctgttgctgatcctgagaatcataaatattcgtcttttcgcggctcataccgtctgaagtcagcggctgctgcattttacaaaagagagtacggcattgatctggatccggaaaccgaagtcgctgtattattcggcggaaaagccggtcttgtcgagctcccgcaatgcttgttgaatcccggtgatacgatcttagttcccgatccgggttatccagattactggtcgggtgtcacacttgcaaaagcaaagatggaaatgatgccgctcgtaaaggacagggcgtttctccctgattacagcagcataaccgctgaagtaagggaacaggcgaaattgatgtatttgaattatccgaataatccgaccggagctgttgctacttctgagttctttgaagacaccgtgcgttttgcgactgaaaatggaatctgcgtcgttcacgattttgcttacggcgctgtaggatttgacggctgcaagcctttaagctttttgcagactgaaggtgcgaaggatatcggaattgaaatttacacgctgtcaaaaacgtataatatggcaggatggcgggttggctttgccgtcggaaacgcttcggtcattgaagcgatcaatctttatcaagaccatatgtttgtcagtcttttcagagcgactcaagaggctgcagcagaggcactgttagccgatcagacgtgtgtggcagagcaaaatgccagatatgagagcaggagaaacgcttggatcacggcatgccgggaaatcggctgggatgtaacagctcccgcaggttctttttttgcatggctacctgtgtctgaaggctatacttctgagcagttctcagatcttttgctggaaaaagcgaatgtggcggttgcggctggaaacggcttcggtaaatatggcgagggctacgtcagagtcggacttttaacaagtgaagaaagacttaaggaagccgcttatcgaattggcaaactgaacctgtttacccaaaaaagcattgacaagaccttataacgatgggataattcaaaataatttataaaatctatattttcttatcaagagcaggcagagggacgagcccgatgaagcccggcaaccgacttataaagcacggtgctaattcttgcagctagcggctgagagataagattcggacgagaaacgaaacctctttagacgcgattgcagtttgaagaggttttttgatatggatgaaaatgaaaggagctctggcatgagtgagttattagcgacatatctcctgaccgaaccgggagccgatacagagaagaaagcagaacaaatcgcaacaggattgacagtaggctcctggactgatctgccccttgtaaaacaggagcaaatgcaaaagcataaggggcgggtgataaaagttgaggagagagagggaactcctgcatcagcaaaacaagcggtcatcacaattgcctatcctgaaatcaatttttctcaggatattccggctttgctgacaacagtgtttggcaagctgtccctggacggaaaaatcaaattaatcgatcttcacttctctgaagcatttaagcgtgcactgccgggaccgaagtttggcgtatacggcatccgaaagctgctgggagagtttgagagaccgctgttaatgagcatatttaaaggcgtaatcggaagggacctgagtgatattaaagaacagctccggcagcaggcgcttggcggagttgacttgattaaagacgatgaaattttctttgagactggtctagcgccttttgaaacaagaattgcagaaggaaagcaaatattgaaagaaacgtatgaacaaaccggtcataaaacgctgtatgcggtgaatttgaccggacgtacggctgatctgaaagacaaagcgagacgcgccgccgagttgggagcggatgcgcttttgtttaatgtcttcgcttacggcttggacgttatgcaaggccttgcagaagatcctgaaatcccagttccgattatggcgcatccagcagtgagcggagcgtttacgtcttctccgttttgcggtttttctcacgctcttttactcggaaaattaaaccgatattgcggtgctgacttcagcctctttccgtctccatatggttcggttgcgcttccaagagcagacgcactggcgattcatgaagaatgtgtgagagaggatgcttttaaccaaacatttgcggttccgtcagcaggcattcatcccggcatggttccgctattaatgcgtgatttcggcatagaccacattattaacgccggaggaggcgtacatggacatccgaacggtgcccaaggcggggggcgagcgttcagagccattattgatgcggtcctagaggcccagccgattgatgaaaaagccgaacaatgcaaggatcttaagcttgcgctagataaatggggaaaggttgaagccgtatgacgactcgaaaaccttttattatttgtgattttgacggaaccatcacgatgaacgacaacattataaatatcatgaaaacatttgctcccccagagtgggtggcattaaaagacggcgtactttccaaaacgctgtcgatcaaggaaggtgtcgggcggatgttcggccttctgcccagccgtttaaaagaagagattacaagttttgtattggaagatgcaaaaattagggaaggctttcgggaatttgtagcatttatcaatgagcacgagattccgttttatgtcataagcggtggaatggacttttttgtatatcctttgcttgaaggcattgtggagaaagaccgcatttattgcaaccatgcttcatttgacaatgactatatccatattgactggcctcattcctgcaagggcacatgcagcaatcaatgcgggtgctgtaagccgtcggtcatccatgaactttctgaaccgaaccaatatatcatcatgatcggtgattcggttacagatgtggaggcagcaaagctgtctgacctatgctttgcaagggattatttattaaacgaatgccgggagcaaaacctcaatcatcttccgtatcaagatttttatgagatcagaaaggaaattgagaatgtaaaggaggtacaggaatggctgcaaaacaagaacgctggcgagagctcgctgaagtaaaacgggaattggcagagagagattggtttccggcgactagcggtaatctatcaattaaggttacagatgagcctttaacatttctcgtcactgcaagcggaaaagataaacgtaaagagacggttgaagattttctgctggtcgatcaaaacggagagcctgctgaaagcgggcattctctgaaaccgtcagcagaaacgcttttgcatacacatttgtacaataaaaccaatgccggatgctgcctgcatgtccatacggtaaacaataatgtgatttcagagttatacggagaccaaaagaaaatcacattcaaaggccaggaaattataaaagcactcggcttgtgggaagagaacgcagaagtgaccgttccgattatagaaaatccggcacatatcccgacgcttgcggcactgtttgtggaagagatttcagaagattcaggagctgttctgatccgaaatcatggtattacggcttgggggaaaacagcatttgaggcaaaaagagtgcttgaagcgtatgaatttttgttcagctaccatttgaaattgaaaacactccagcatcagctggttaaataaaaggaggaattgaaatggctacaattcgaattcatgatgaggcaaatacaacgattgaaaatcaagaggaagtggcaagctttctggacagtcaagaggttatttatgagcaatgggatatcacgaagcttccggaacatctctcagagaaatatgacctgacagaagaagaaaaacagcaaattcttgataccttcgaaactgaaattaaagatatctcaacccgccgcggctataaagcacaggatgttatttcattgtcagacagcaatccgaaacttgatgaactgcttgaaaactttaaaagagagcatcaccatacagacgatgaggttcgttttattgtaagcggacacggtatttttgtcattcaaggcaaggacggcacgttttttgatgtccgtttaaaccctggagatttaatctccgtgcctgagaatatccgccattacttcacgcttcaggaggaccgcaaagttgtcgcggtgagaatttttgtcacaactgaaggctgggttcctatttatgaaaaagacagcgtgaatcaataagcatgagatagccccgttcatcgaacggggctttttatatttattgcaaacgccacttttcatactgtgacagttcttttttaatcattgtccaaatcaaacctaaaacagctgcatcgtcaatgaatccaagaccgaggatgacgtctggaatgatatcgagcggcatgacgatatacaggattgcggcagttaacagcaaaagtgttttaacctgtgaacgagggtagtcgccatttcgccaatcgcgaagcatctgaaaaaaagtagtgatgtgctggatacatttttttcggtttttcctcttcaaaattgcttttccgcctgccgctccgagcataattgctttctttttcttcattgggcatacctcctgcctggcggcgtgtttaagatattcttcacctgggtattgttcttctaatcctatcaatatatctattatacctgaaaaattaacttatttaatgaaaatatgtttacaaataaagtataatctgtaataatgcacaataacccaatcaaacttgtttcctatttcttagcggcgaggggtgaagtgaatgggcggttcttctgaacaagaaagattgttggtgtctattgatgaaaaaagaaagttaatgatagatgccgctagaaagcagggatttacagggcatgacacgatcaggcacagtcaggagctggattgtttaataaatgaatatcaccagcttatgcacgaaaacgaacattcccaagggattcaaggccttgtaaagaaattaggcttgtggccccgcagagatgttatgccagcatatgatgcaaataaatagcggcctatcagatgcatatataaagagagagcttttcggaagcgctctttttttctggaaaaaattcatatgaaagggggaactaatgaaggaactggcgattctcattaccgaaatggtcaatcaatttcatgatgcttttatttccttatgcggaatatttggcatttatttaactgacaaagaaatgcatttttgggtgatcggcatttttggcatattctttttcggcgtcactcacgctgtgtttacatggctttctaaatggagtatgacagccttgtcctttatctataccgttacagtcatcattgtcatcgtatttgcgattgagattcagcaaaaggtgacggggagagggaatatggagtttttagatgccacggaaggtataaagggttttttagtattttttatgttttttttgcttttgaaaatgctgttgcgtttcatcaaaatccttttttctggaagaccagcaagcaaatcgaatggcaatacccgatcacgaagataaaaaaccctcctgacatggtcaggggggttatgaagcggatacagggagggtgattgtcacctctgtgcctcttcgcacttcactttcaatatgaatagagcctccgtacatcagcacgatccgtttacaaacaacaaggccgagaccggttcctttttctttagaagtaacaaagggaaggaagatgtgatccagcatttcctgagaaatcccttcaccgttatccacaactttgattatggcttttttatctaaagctcccagggagatcgtcagtttgcctccttcaggcattgactcgaggccattttttgctacatttaaaatcacttgtttaatatgatcttttgtacattttacgagtaagggctgctcggttaaatactgtaattcgacttcaacattgtatagattgccctcagaataaatgatcggcataatttctccgataatgtcctgaagtgagttcagctcccatttttcagctgtcggcttgccgagaacaagaaactcactcactatttgattgatgcgcttgatctcctgttcgataatggagaagtaaagctgatcttcctcacctttatatttcttttgcaacagctgaataaagccgcttatgccggtaagaggattacggatttcatgggctgtgctggcagcaagcgtcccgatcagctctaatttttgcgcctcattttctgagcgctccagctgggtctgccgcttcagcaaataatacagcacgagaataaaaaggatattcagcagaacaataatacatgaaagcggaagcacaaggcttttcgtcagttcttctattgtgaccgggttcggatagactttcatattccagctgatatcatccagatatccgctgacaggtttctgatcctctgcatgagatgcttgtccgctcgcaaaaatcattttcccgtcttggttcacaacttcaatataaacatcagggcttagtaagttaatgagatttttcaaataatcaatttgaatagctgcgacaagataatctgtcacattacgttttgagtccaaaacagggacacaaattgtgaaaattggctgaccagtaattctgctcgaataactatctgaaatgactgtctttttagtttcctttgcttttgtaaaaaaagatctgtcggccaggtttacattcgtttttaattcggttgtgcttgcggtgacgtctcctttggcattgagaaaatagagaccggaaaatctcggctctgaatcaaaggtcttttccaaaattgactgcattttctttatatcaaccggtctgtcaatggcgatggacaaggaggtcattctcgccattgtttctccgattaaataattgattttgttgcggtgaaggtttagcaggacacttgcttcttgtttatgttctgcagctattgtatctttttctttttcatatacgaaaaagctgatgacgattgccggaatcacgaccagtatgatataaagtttgactctcccgcaggcgccttttagtattttcaatttgcatcgctccaacatacacctgattagaggtattatatcattgtttcttcttctttaataagaaaaaataaccaaaaaaattagaaaaaggtgttggcaagcttacattttaaaaaagaagagaaatattggaaagatttttattgacattttggtctttgtttattaatgtttctctgtaacggtttctaaaaggatgattgagacatgacagaaaaatcactgaagttatttatcgtgctgtcgcgcgcgtatcggtctattaacgatcatatgaataagcatattcataagcatgggctgaatccgactgaatttgctgtgctagagcttttgtaccataaaggcgatcagccgctgcagcagataggagataaaattctcttggctagcgggagcatcacatacgttgtagataagctggagcaaaaagaacttctcattcggaaagcgtctcctacagacagacgagtgacatttgcgcaaattactgaaaaaggcatcggtcttttgaacgatattttccctgatcacgctgctgaaattgatgaaatgatcagcgtattaagcgaagaagaggtagagatgtgcaccgaaatgttaaaaagagtaggattaaacgcaaaacagtttcataataagtaaaaaaaggaagcctgatatgtcacaaggcttccttttttgctatttttcatttgtttccgctgcgcctctcggcaaaatgagaacttcaacccgccggtttttgcttcggccttccgcagttttattggaagccaccggtttatactcgccataacccttggcgctgaacacttttgcatcgagcttggggttttcaatcaggagccccataaagtttaccgctctcatgacgcttaaatgccagtttgattggaattcagaatttttaattggcatattatcagtatgtccgctgataatgatatttcttggcgggttaatcacaagaagatttgaaatctcttttgcaagcggcacatcttccttacggatggtcgcttttccagaatcaaagaagatgctgtctttaatcgtaatcagaaggccttcactagtcatcttcgtctccagctgatgttccagctttttatctttgatgaacttttccacctggctcttcacattttcaagttcttcttgatcagctgctttttctttttctttcttgtttttctctttctcttctttttcctttttcacttcatcgatgccgtctgactcgttttcaggaggagtgacactggagtagtccagtacaccggtgccgcctgtaaagacttcattaaatgattttgagagcatttgaaacttagctgcgtcaatcgagctgctcgcgtacagcacaataaacaatgccaggagaagagtaaggatgtcggcgtaaggaacgagccatgattcatcaacgtgctcgtcctcatgcttcttcttcttttttctcgccattttgcgcctctccttgttctgcaaatttcaagcggtccttcgcaggaagatacattaaaagcttttgttcgatgactttcggtgcttgtccttctaaaacggataaaacaccttcaatcatgacctcacgcagttttacttcttgttttgattttcgttttaatttatttgcgaaaggatgccataacacataccctgtaaagataccgagaagtgtggcaacaaaggcggcactgatggcgtgtccaagctcatctgtattgtccatatgagagagagcggcaatcagcccgattacagcgccgagtactccaagtgtcggagcgtacgttcctgcttgtgtaaaaatagcggctccggcttggtgtctgtcctccattgcttcgacttcctctgtcataatatctctgataaattccgcgctttgcccgtcaacagccatgctgagcccgtttttcaagaaagcatcatctacatcctcaatgcttgcttctaaagcaagcagaccttcgcggcgtgcaagctgagcccattcagagaacataggaatgagttcctctattgtgagctgtttattttccttaaataacactcgaaacagcgcaggcacttttttaatttcttttgttgggaacgcaataacgactgctgagattgtcccggcgataataattaaaatggcagcggggtttgcaagggcgctgaaactgacgcctttcagaaccatcccgacgctcaatgccacaaaagcaagaataataccgattaacgaagttttatccatagtttttcaccaaatccttttttactatcttgtctatggttaatatcggttttggtgcccggaactttagggacattgtgaatttgttcatgaaatattcaaggaagaggcatagaagggagaaataaacaaaaacgggctctccaaaattgaaaagcccgggtgtctactgaaattagcagctttcttgcaagctgtccttcagatggtattcatataatagtagaaatacatattcactgtatataaacatgttccatccctccttaaaaaaagtgtaaaggatgaagggaagtagcgcttcaggggaagggacggtattttctaagtcaagagtatgaaagcataaaaaaagcggcttcctaaaaggaaaccgctgattgttatttcgctcgcactttgattttatcatcttctaaaatcacgtgaaaacttgtgatctcgccattatcaagcagcagatcggtcatttcatcctcaacccattcttggatggttcttctaagcggacgtgcaccgaatgaagggtggtagcccagctcagcgattttttctttcgcttcatctgtcacattcaagctaatgccccgttccgccaatgtttcttcaagttctccaagaagaaggctgacgattttgacaagatgttctttttccaatgagcggaactcaataatgctgtcaaaacggttgaggaactcaggtttaaagaacatgctcagtgaatcaattaatgtttgttcttcgatgacactgtcatctgattggaaaccgactttcgtttgtttctcaccagcacccgcattacttgtcatgatgatcacagtgtctttgaagcttacggttctgccttggctgtctgtcagacggccatcttccataatttgcaggaacatatgctgaacgtctgggtgtgctttttcaatctcatccagcaacacaatgctgtaaggattgcggcgcactttctcagttaattgtccagcttcctcatggccgacatatccaggcggtgaaccgataattttagatacggcgtgtttctccatgtattcgctcatatcgagtcggataatagcgtcttttgtgccgaataattcatctgccagtgttttagaaagctctgttttccctacgccggtaggaccgacgaagaggaaggagccgactggtctgtttttggattttaaaccggcgcggcttcgtcttaccgcctttgccactttttgaacagcggcttcttgtccaatcacgcgttcatgaagttttgcttcgagttctttcattttcgtttgttcgtctgcctgcagtttgccgacagggatgcctgttttttgttcaacaatttcctgaatgtgctcagcttccacagtgacagcagtatgagcggaggagctgttcagttttttctccaatgcgagttcttcatcacggagttttgcagccagttcgtaattttcttcttccagggcttttgttttttcggcttcaattgcagttaagcgttcagcggcatcctcatcattcagttcatcaattaacaggttagcttttgaacctgcttcatctaataaatcaattgctttatccggcaggtgtctgtcctgaatgtagcgggatgataaagtgacacacgctttgattgcttcatcactgaatgttacgccatggtacgcctcgtatttgtctttaatcccttgcagaatgaggatagcctgttcaattgaaggctcctgcaccatgacaggctgaaaacgtctttccagcgcggcatctttttcgatttgacgatattctttcagtgttgtcgcgccaatgacttgcagttcgcctctggctagggccggtttgagaatgttgccggcgtccattgatccttctgcagagcctgcgccaacgagaaggtgaatttcatcaatgaacagaatgacattttttcgttccttcagctcagtgatcagctgtttcattctctcctcaaattggcctctgatccctgtgtttgcaacaagggatgcaacatcaagcaaatatagctctttgtttttcagtttgtttggaacatcaccttcagcaatttttaaagcgagcccttcagcgatggcagttttccctacacccggctcaccaataagaaccggattgtttttgttccggcggtttagaatttcgatcactcgcgccacttcatcatcacggccgatgacgggatcaatgagaccggctttagcaccgtttgtaatattttgagccagctcatcaagcagccctttttttccgctttgttttgctgcgctcttttctttcggctggaatgcctgttcaaacggaaatccgaaagattgaggacccatactcattgaaggtttacgggtcagttcgttatagcaagtttcacaaagaaccatctgtttatgaacggaatttatttgcatgttaaggcgaatcgtcgcctcgttttgatgacaatgttgacaacgcatttgccaaaacctccttaataatttgatcttctttgaccaatgaaagtgaataaaaaggtctattggatttgaccttctttgactattagtatacggcaaacttaacggctttcaaaccaatatgctcaaagcagactgaatatttgactatctttgaccaattggtttttaaaaaaggccggtttgtttgaccaactttgattaatagtatactctgaccatctttgactttcaagccttttgcacaacattttttaatttgttacaaagtaaaacatgttttcttcgtcttttcaaggaacttgtctcataggttataaaaaggcatctatggacaaaactgcggttcgttcggaggggagaaatggaacaatcaaaagggtctgcaagtcagcttgcttttgtgtatgtcggcacagtagtcggagctggatttgcgactggcagagaaattgttgagttttttctgaagttcggctggttcggtttattcggcattctcgtcagcggcggaatgtttacgtttctgggcgccaagctgatgatcatttcaaagcgaatcaatgccaagtcatatcaagaaatgaacatctttttgttcggggcggcggctgggcgaattatcaatgtatttatgctgtttgttctcctcggagttacatctgtcatgctttcaggagcaggggcgctttttgaggaacaattggggatgtccgctcagattgggatgcttattacaatcggtctgagcttaattgtgatgactagaggagtaaaaggcattttcggtgtcaatgtgtttgttgttccccttttaatcctcttttcaatgattgtagtggccgactcttttatattcagcgaatcacgaaacgcagctcagtgggtctggccgcatcgctgggattggctgttatcagccttttcttacggggctttgaatttatcgcttgcccaagcagttttggttccgctggcgaatgaaatgtcctcggagaaagtgatcaaaaaaggcgctttaatcggagggacgatgctgacgattgtgctgtccgcgagttttctgtctttgtcaactcttccggatgtatttttgtatgatataccgatggcacaagtggtttatctctttgcacgatctgtccatttgatttatttactcattattttcggagaagtgttcacatcagttatcggtaatctatatggattagaaaaacaagtgcaaagctttcttccagtgaaaagcaaatatatctttgcggccattatgatcacggcttatattacgagccaaatagggtacggcaggcttatttcaacgatttatcccttgtttggctatgtgagcctggccttcataggcgctttgctttgcaaaaaagctcctcggcggcgcagtttataaatatatataatgaaacgaaccgtcactatagagcgataattgatctaggaaccggggactgacttttttattgtcaagaaaaacatcattatggtaagatagcagaagtgaaaaaattgaagaaaatccgtgcgatatgcgggagaggttctagctacaccctctataaaaaactaaggacgagctgtatccttggatacggccttttttatgtttttctagagcaccttccgaaaaaaggtgtttttttgcgtgaattagctgtagcgatgtctctcgccggcgtttttattgcggagaaggagaggaatcatgaaaaaagaaaaagcaattgtcgtatttagcggcggccaagacagcacaacatgcttactgtgggccttaaaagaattcgaagaagtcgaaacggtgacttttcattataatcagcgacattcgcaggaaattgaagtggcaaaatccattgcggaaaagcttggtgtgaaaaatcatttgcttgatatgtcacttttaaatcagcttgcaccgaatgccctgactagaaatgatattgagatagaagtaaaagacggcgaactgccatccacattcgttccaggccgcaatttggtattcttatcctttgcgtctatcctggcttaccaaattggcgcgcgccacattattacaggagtttgcgagacagacttcagcggttatcctgactgccgtgacgaattcgtgaaatcttgcaatgtcacggtaaatctggcaatggagaagccgtttgtgatccacacgcctctcatgtggctcaataaggcggaaacgtggaagcttgcagatgagcttggcgcgctggattttgtgaaaaacaacacgctgacatgctataacggcatcatcgcagacggctgcggcgaatgtccggcatgtcaccttcgttcaaaaggttatgaagaatatatggtgatgaaaggagagcgtgcataaattgttatctcaaatttatccgcaggcccagcatccttattcgtttgaactgaataaggacatgcatatctcagccgctcattttatccctcgggaaagtgcgggagcgtgcagcagggttcacgggcatacgtataccgtaaatataaccgttgccggcgacgaacttgacgattcaggctttcttgtcaatttcagcgtactcaaaaaactggtgcacggaaactatgatcacacgctattaaatgatcatgaagatttttctcaggacgaccggtattcgctgccgacaactgaagtcgtggcgaaaacgatttatgacaacgtacaggcttatttagacactttggagaataagccgacctgtgtacaggtgtttgtccgtgaaacaccgacaagctactgtgtctaccgtccgaaaaagggtggtttgaatggctaaaggaattcctgtattagaaattttcggcccgacgattcaaggagaaggcatggtgatcggacagaaaacgatgttcgtccggacagccggctgcgattattcctgcagctggtgtgactccgctttcacttgggacgggtctgctaaaaaagatattcgctggatgacggcggaggagatttttgcggagcttaaggacattgggggagatgcgttttctcatgtgacgatctcaggcggcaacccggctctgttaaaacagctggatgcttttattgaactgctgaaggaaaataacatccgtgcagcgcttgaaactcaagggaccgtttatcaggattggtttacgctgattgatgacctgacaatttctccaaaaccgccaagctcaaaaatggtaacgaactttcaaaagcttgaccacattttaactttacttcaagagaatgatagacagcatgctgtcagcttgaaggttgtcatctttaatgatgaagatctggaatttgccaaaactgtgcacaagcggtatccgggaatcccgttttatttacaagtcggaaatgatgacgtgcatacgacagatgatcagtcactgattgcacatttgcttggaaaatatgaagcgcttgttgataaggtagctgtcgatgcggagctgaatctcgtcagagtgctcccgcagctgcacaccctgttatggggcaacaaacgcggagtataatagaaaggaagatgaacatgacgacaagaaaagaatcagaattagaaggtgtaacattgctaggcaatcaaggtacaaattatttgttcgaatatgcaccggacgtgctggaatccttcccgaataaacatgtaaaccgtgattactttgtaaaattcaattgcccggaattcacatctttatgtcctaaaacaggccagcctgactttgcgacaatctacatcagctacattcctgatgaaaaaatggttgaaagcaaatcattaaagctgtatctattcagcttcagaaaccatggtgacttccacgaggactgcatgaatatcatcatgaatgacttgattgaattaatggacccgcgctacattgaagtatggggcaaattcacgccaagaggcggaatttccattgacccgtacacaaactacggaaagcctggcacgaagtatgagaaaatggccgaataccgtatgatgaaccatgatttgtatccggagacaattgataatcgttaattattccgttgtgtgatacggagtgtaaaaggaagtggagtcacagtaaaatccgaacattcagcgttaattttcagcgaagtgtgaccggagtgtgacccgcactaagctcaataaaagtgggaaaagtcacacctgaaaatggctctactcatgggaattgtattaaaaagtgtgacctgaggtgcaacctgaactgtgacttttatgcagtgaaaaattgatagtacagaagcagattaaggcgtacaatttgtacgtcttttcttttttatccgaaagaaaatatgcctatctagagatcataggcattaaatattattatcaatatcttcatttattttttggctaagtttctgaaccttctctttaacatttgaaacagctcttttttgaatttcatcaaagttctcctgaatatagtcgatgacacttcttattagaacttcactttcaaaattgaatatctcatttatttctgactgttcttcatctgttaggtgatggtattgaagttgtttagcatttacttcagtagctacatcaatcctaacttagttgttctggttgtacaatttcatattcaccttctgtatacttttgctccgcataatggcttccccattgacagagctcctgcaagataggtttaagagattctccaagttcagtggatgaatattcaaccttcggcggtacttgattatacatctttctgctcacaagtccactggcttcaagctctctaagtgtttgaatcagcattttctgagttatatttgggataatgcgctttaactcactcgttctctttggtccattcattaaaaagtataatacaaggcctttccattttccgccaataacttcctttgtcacttcaaacccacagctaaattttttcatgtctaaagctctccattccacatttattactttttagttactatatcacaaaaaagtgggtacttccgataatgggcttactgaaggatactatatcttgtaagttgttcttcaagtacttaaaggtactagacataaaataaaataattctaaaggagtgttaagtatgggtaaatttgaaggtaaaatagcgcttgtaacgggtggaacaagtgggattggtcttgctacagcacaaaaatttgtaaacgaaggtgcatatgtttatatcacgggacgtagacaaaacgaacttgataaagctgttaaccaaattggcaagaacgtaaccggtgttcaaggtgatatttctaagcttgaagacttagacaaactatatgacattataaagcaggaaaaaggtaagttggacattctttttgctaatgcaggcatcggcaactttcttccattaggtgaaattactgaagagcaggttgatagaacgttcgacattaacgttaaaggaaccatctttactgttcaaaaagcgttatcactattcccggacaaagtaggttctattattgtaacgggctctactgctggatcaattggcaacccagcgtttagtgtatatggagcatctaaagcagcattaagagcactggttcgcaactggattcttgacctaaaaggtactgaaatccgtgtaaatgtggttagtccaggaggtattcttacacctgcctacgatgagctttttggtgatgcacttgaagaagtaatggaaaatagcagaaatactgttccagctggaaaagttgggacacctgaagaagtagcaaacgctgtatctttccttgcttcagacgaaagcagttacttgacgggtgttgaattgttcgtagatggcgggctagcacaggtataatttcactgcgcagagattacaaatagtccccaaaaaaggttaatggggatttacttgaagaagtcgtataaaaaagtcgttttccttaaaggacagggaattcgacttttttatgtttgaatttgattaacgttgtaaattcgcattttcctggggctaccactaaatgacctgtaaaaaagattacactgtgaataaatgtacttaaagtaacgggggctcttgacttttaataaaaaataatatccctgtccttgtattctaatacttttgaaaatatttaaaggaatccttatgtcctgaataaccacataggaaaatatgttgtaggttgctttctttttttgtggggcatcccacacaagctatcttgtgatctcacacctgaacgttttttatagactagtaccgcgacaagttatattacatatacataccaataaagtagacattaaaagtgaaagagaggatggaaatgtgtgaaaattcttttccttgagagtcatcccatgtggctctatggtttaccgaatgggtttagggaagcaggacataccgtaatgatttccggtcctgtaagtcgggaaaatatcactgaaatgatagacgaatttaaaccagatctaatagtatctatgggatggacaccagagcattcaagggaaaagcaggcctggattcgcaacgctactaaaaaggtgaatatccctctcgtttattgggctactgaagacccgctgcacactcaaaactttactatcccgttaattaaaaagatgaaaccagattttgttttcacggttacgccttctctgtgtaaaacttatgaaagcatggggattaaagcagctcacttagattttgcatttcacgaaagtatacatcaccagattaaaccattagcaaaatacagttgtgatatagcagtggtggctaatgcttaccctaattttcttgaagaacatccggaagtgttccgttcgtcctctttaaaaacgcttattcgtcctcttatacggaagggtattcgcattgatttttgggggagaaactgggaaaaaatgagtaaatatataggaagagaaattccccccaattggatccatggataccttgattatactgaagcatataaagtttacagttcagcaaaagtcgttatcggtttgcaaaactgtgaaagccaacttacgcaacgcacctatgagattcttggttccggggggtttttattgacatcggatacaccagcagttcgaggtaaattcaaatctggccgcgatctcatcgtttcttcctccccaaaagaaacattggaaaaggttaaatactatttgaatcatgatagcgagagaaaaaagattcagataaacggtaaaaaggctgtaaagaatgattcctatcggcatagagccgagagaatgcttgaggtgctaaaaagcagaggaattataagaaacttaggggaaaccattcattatgtagatgttctcaaagaaaaatacctgatccatcatgttactcccggtgaaacattatcaataattgccaggaagtataatgtttccctgcagcaactcatggagcttaatcatttcaaatcagatcaaatatatgctggacaaatcattaagattagagagaaactgtttagaaatattaataacaaatttttctaaaggagagtaatatgaatgaaggagagaataccaaaaaaggaaatagagcgaataaagtaaaaagaacgcctcgttatatggaatttcccgtgacatacgaagtatataatgtggaatccggcgatacattatggacgattgccaaatcctttaaaattccggtacaacaacttatgaatcttaataagctttcttcagatagaatttatcctggacaaattataaagataagagaaagataatctttgaggtttcggaaacgaatcaaattgaaatgacaatccttatttttttatttgtggggaacttgatatttttggggatgaaggggttatgagatgtttcaaatgagctatttctattctggattaggatgggattttattcaacacgttgatcaaacgaacggagtattaaatgttgtgtctcctgattttttctatatcagaaaagatggatcattacttctccgttcagctaatcccgatgtgattaaagctcttcatagaagaaaattaaaagtagttccttttctaagcaatcattgggatcaggatttgggacgatttgcattaatgaaccgagttcgtttagctaaacaaatttctcatgcaatagaagaactggatttggacggaattaatatcgatatagaaaaccttacagaaaaagatcggaatctatttacagattttattagattagtaaggaaaagtattcctaaacataaagaagtatcagttgcagtggcggcaaatccttttggctggacgaagggctggcacggatcatatgattacgagtatttagctaaatatgcagattatcttatggttatggcctatgatgaaagccgccttgctgggcctaccgcaagtgtaggatgggtggaaaagtccattcaatatgttctgacccaaaaaatctctcctcaaaaactagttttaggattgccattctatggccgctgctggatggaaggccaatctgcctctcaagccattcccctttaccttgttgactccttagtaaaaaggcatagcgggacaattatttttgacaccaagagtcaatctccaaaagctatttttactgtcaatcacgataacaaggggccgttgccttcgggaacatatacattatggtttgaaaatgaacagtcactcagagcaaaaataaaactcgctcaaaaatataatctgaaaggtcttggcagctggagtcttggacaagaagatgtgtcagtctggaatacagtgtttaaaaatatataatgatttatagttcagaacaaaattcgaagataattgcaatgaatctctaaatggacatactgaaaggagtttattacgagtgcgggtaaaacagtgagggcattccataggcccttctcccgaaatgttctatacgaggcattacattgggcttgaaatacacattcaaacttatgttatagtacgcatttcaagtaattacggatgtgttgaatttattctgcttccatgatttaagtcatacacatgctacttgatagcaggattattgcatttcattcagaattgttcaggatcgatatggaagcgcacgaataactagaactttaaaagcatacactcatatacttcctgaatggatgctggtttatctaaaaaacatgatgagaattgattgaccgctctcattaaaggatggagaaattcaaggcgccaaggtacgcatggtgaaacatgacttgttgataatcgaccatatagtttctccttagaaatgagggggtttttacataaaaaagacgagcgaatccggggggaattccactcgccgctttctaatgaaaagacgggatgctggatggcagctcgtctgttttattataatttaacgaacgtatgtttgtaaaggtgtcttttcgaatgaattggttcatataaccgttaagaacagattcattgtaaacattcgctaaggtatgctaagatgcatggactataaaggagtgatatgaagtgaagacattgcggttaaacaatgtaacgttagaaatggctgcatatcaagaggagagcgagccgaagcgaaaaattgcatttaccttaaacgttacgagtgagacttaccatgatatcgctgtcctgttgtatgaaaaaacgtttaatgtcgaggttccggaacgcgatcttgccttccggggggaaatgacaaattattcaacatcattgaccaacctgtacgaaccaggggccgtcagcgagttctatatagaaataacagaaatagacaaaaacgccgattcatgatcggtgttttttatgtaaaaaagctgccggccggcagcttttgagaaagcgaatttcatatgtaaggtgttaaattgtccgtcttgcagttttttgaataaatgtggaaataaggaggttttaataggagtctctgatgatcttataatttttatgattaacaactgtcaatgaatctaactcaagatcccgatagttatccatgatcgtcacatcaacgataacagaattctcatttactttttcaacaacaccggttaatccgtttttaaattcaatgacattcccaaccttagcgattttcacaagcttcctctcctttaaacataataatgccttttgaaagtattttgcagtattttcattgagaagtaaagcgataaggagttttatctcccttatgaattgtcctgtcgctataaagatgatatattgattttcgtcaatagaaagaaaaggggggaatttttgttgcgtcccgaagaaataacagaaatgattgaacagctgcgcaccggcgccataaacgaactgagagtccagaaagagcattttcttgatttcagggccgtgttatctaaacaagatgattttaaacatttccgaggaattgcccagcaaggcggagatgttatctttcaatacttagaacagccaagaagctgaaggtttctcatacgtgagaagcctttttatcatatatgacagaacacaagccttttattacagctgtctgtaacaggtgtaataaaatgtaaagtgtcaaaaatggataaacatgttttaatttgacaatatttatagaatttcaaactgtttttttgccattaagcagtgagtcatcctctttattccatcctgatacctccttgggagagttggaaaatctttttccgtgaaaatgaatggatctcttgttaaggttatgaagtgttttttggagcactttaaggaggaaactgtatgacaacgaaattcactgctctggctgtttttcttctttgtttcatgcctgcagccaaaattgagcatacacaagcttcactactgagcgcaaagaagacaaaacatgaagaagcgaaatggcttacacatatagatcgaaatacgaatgaatctttcccttcactgtctgctgataaagacaagaaaataaaaccgattaagctatcagcacacactgaaaagaaagagaaagataaaccggacaaaacaaatgatgagaaagaaacatatacacagtctgaaaaagagttgctgtcacgtctcgttcacgcagaggccaaaggagaatcatataaaggcaaggtcgctgtagcaagcgttgtactgaacagaacggagaaaaaaggttttcctgatacgataagaggagttatttatcagaaaaacgcctttgaaccggtcgcaaacgggagcattaaccaaaagcctgataaagaatcgattgaagctgccgaagaagcgctgtcctcaaaaaatagagaaacagatgccatattcttttataatccgaaaacagcgtcagataattggattcgttcaagaaaaatcgtagaaaaaatcggcagacacgtttttgccgtctaagcatagaagagacaatttgtctcagctgtgcttttttcatataaagagtaaaaataaaataatttttgaacttgtctcatatgatgttggtagtacaagagacaaggagagacatcatgaatcgatttgtgaaagggatcattcttttatccattgccgcctttttcgctgaatgccttgaatttgtcgtcaatatgattttggcgcgggagcttggcgagcatgggatggggctttacatgagtattttgcccacgatctttttaattattgtcatcgcgagcctggaactgccgatatccatttctaaattcattgccgagtcaaatcctaagcttcatgaaagcatgctgaggcacgctttcagaatgacagccatttttactgctttttctactgtcgccgctagtattgcgcttccgtttataccggtatttgatacataccacccgtttattaaagggattgtcatcggcttaattcctgttgtcgcctttacttcaatcgccaggggctactttatgggtgtgcagaaaatggggaagatcgcaattgccaatgtgctgaaaaaaatcatccagctcttgtgcttattcctcttttttcaatggtactcatttgaattggacatggctgtgctgatttccttgtttgttctagtcgtgagtgatgtggtcgtgcttgtttatttatattcacaatttatcatggcaaggcgggcgttatccggccagcagcacattcatttgcgcggaaaggatgtaaggaaaagactgcttgctgtttcaattcctacaacaggactgcgtatttttcatgcggttgtcaatgcaattgaaccctttttagtaaaaggagctcttttggctgcgggcgttgccgggacagcggcgatcgatcaatacggaatgctggcaggagtggctgtgacgatagggtcgttccctgcttttattgcccattcgttaatggtcgtcatgataccgagtatttcggaagcttatgcactttctcagtatgacatcgtgttaaaaaggctgaagcagtcgattttcattacattaggttacggtatacctgccgtctgggtcatgttccagtttgcgggacctctcacgcatttgttttttcactctcctgaagcgcagtattatttgcagctgttgtggccttactttctctttcatctgtttgtcatgccgctgcaggcgtgcttaatcgggatgggttttgtgaaagaggctttttatcacaatgtatggagtcatatcgttgcgctaagtatgatgtatgtactgggatcaatggagaatctgcaaatgctcgggattatccttggaatgaacactggcatgattcttttgacgagcctgcactatgccacgatctgcaaagcattgaaggtatccgtattccttacgggagggaccagaacgccgcgaattgaaggatgatataggaactgcaggggcaagctaattgaaaagcatgaaaggaagattccatgttgacgaagcgcttgcttactatatacattatgttattagggttgattgcatggtttccatgtgcggcacaagctgaggaaaaacagcctgctgttcccgctgtttttcttatgaaaacgatagaaggggaggacatctcgattccgaataaagggcaaaaaacaattctccatttttggacgtcatggtgtccgccctgcaaaaaggagcttccccagtttcaatcgttttatgatgcccatccatccgacagtgtaaagctggtaacggtgaatttagtgaattcggaacaaaatcaacaagtcgttgaagattttattaaagcaaacaagctgacgttcccgattgttcttgactcaaaaggggaattgatgaaggagtatcatatcattacgatcccaacatcatttttgctgaatgaaaagggagaaattgaaaaaacaaaaattggcccgatgacagcggaacaactgaaggaatggacggaagaatagctgagagcatagactctcagcttttttcatatagagaagaagcgaataaacattaatgataattattatcaaaaagaaattaaaataattataattgaaattctcttcgtgcgtgctataataaaggaagacatcaagaaataactgacgataaagctgccttttgggcagcgattttgtttttataagagaaatgaagatgatttacgttctcaattagagaggagaattcgatatgaatgaacaagttatcgttcaacgcgacccgcatgagccattgaaaacagacaagagggaaaaaaactgggcacagcacgcggagcttattgcagcacttgtatcaggcgctcttattttggcaggctggctcttatccggatatcaggtattatccataatacttttcttgctggcttttgtgatcggcggatttgctaaagcgaaggaaggaatcgaagaaacactcgaagccaaaacgctgaatgtagaacttttaatgattttcgctgccgttggttccgccttgatcggatactgggcagagggtgctattttaatatttattttttccttaagcggagctttagaaacatacacgatgaataaaagcagcagagatttaacgtctttaatgcagcttgagcctgaagaagcgacattgatggtcaatggtgaaaccaaaagagttccggtttcagacttgcaggccggtgatatgattgtgatcaaacctggagaacgcgtagcggcagacggtatcattgaatcgggctcgacaagtcttgacgagtcggctttaacaggtgaatcaatgcctgtagaaaaaaacacaggcgacactgtattcacaggaacggtgaatcgcaatggctccttgactgtccgtgtcacgaaagcaaatgaagattcgttattcagaaaaattatcaaactggttgaatcagcgcaaaatagtgtttcacccgctcaggcttttatcgaacgatttgaaaatgcttatgtgaaaggtgtgctaattgcggtggcgctccttttattcgtcccgcactttgcgctgggctggagctggagtgaaaccttctaccgcgcaatggtgtttatggttgtcgcgtcaccttgtgcgcttgtcgcctctattatgccagcggcgctgtccctgatttcaaatggcgcccgcaacggtatgcttgtgaaaggaagcgtctttcttgaacagctgggctcagtgcaaatgatcgcctttgataaaaccggcactgtaacaaaaggccagcctgccgtagagacgatcagaatagcagaaggattcagtgaagcggaagttcttgaggctgtctatgccatcgaaacgcaatcaagccatccgctcgcccaagccataacggcgtacgctgacagccgtggcgtgaatcagtccggctacatatctatagaagaaacctcagggtttggcgttatggcagaagtgtcgggtgcgatatggaaggtcggtaaagcaggttttatcggcgaggaaatggcagcacaatttttgaaacaaacagcatccgatgtcattcaaagcggtcatacaattgtatttgtgaaaaaggatgatcaaatagtatgctgtatcgcactgaaggaccaaatcaggcctgaagcaaaagaggtcatggaagaactgaaccgacttgggattaaaacggccatgctgacaggagatcacgaagacacggctcaagcgattgccaaggaagccggcatgacaactgtcgtagcagaatgcctgcctgaccaaaaagtgaatgaaatcaaacggttaaaagaagaattcggaacgattgcaatggtgggtgacggaatcaatgatgcgccggcactcaaagcggcggatgtcggcattgcgatgggcggcggaacagatgtagcacttgagaccgctgatatggtcctcatgaaaaacgatttgaaaaagctcgtaaacatgtgccgcttgtctcggaaaatgaacaggatcatcaaacaaaatatcgtgttttctctagctgtaatctgcctgctgatttgtgcaaactttttgcaggcgatggaattgccatttggcgtgattggtcatgagggcagcacgattttagtcatactaaacggtttaagactcctaaaataaagccagcagcctaatcaggctgctggctttttatgtatcaagctttcccttcatttttgtctttatcagatcttttcataaccaggatgagagcgaggatgcagcaaaggaaacccgctgcacagcctatgatagagctgtaataataaaagcccaccatcttcatcccgataaaaggagcggaaattcccaaaaccgttaagagcataactgcttttcgtctgaaaaaattcatcagcaaacggaacaaccccctgcgattgaacgttactgtcagtatacaggaagaggagcaggaaataaaatgcattagaaaatgaaggcgtcgtgaaaggcaaacaccggtaaaacctgttacaatggaagacagaacaatgcattgcaaatggcagggaggaacaagaagtgaatagaatacaacgcgtctcttcatggctgaaggaagcggggcatactgccgcatttattcatacaaaagaaaatgttttttacttaaccggtttttacacagagccgcatgaaagattaatggggttatttatttttcaagaagaggagcctttctttgtttgtccaggaatggaagcaggacaggcccgcaacgcaggctggaatcatgaaatcattggctatgcggatcacgaaaatccatgggagctgatagagaaggccttgaaaaagcgaaatatcagcatacatacgcttgcggtagaaaaggattcaatctcgctatcacgtgcagaacagctgaagcatgcgacgggcggggctcaatttgtttcagcagaagaaacactcaatcaatttcgcctgattaaagaagacaatgagattcgtttgctgaaagaggcggcaaagcttgcggattacggtgttgaagtcggcacagccgctttgcgtgaaggcatcagtgaagtggaagtgctcgctcaaattgagtatgagctgaagaaaaaaggaattcagggcatgtctttctctacaatggttttattcggagaaaaatcaggccagcctcatggaaatcctggtacagccacgttgaagaaaggtgattttgttttatttgatctcggtgttattcttgacggctattgctctgatattacaagaacgtttgcatacaaaaccatcaatccgaagcaggaggccatttacgagactgtgcttcaagcggaaaaagccgcgattgaggcaagcaaacccggtgtgagaatcggagatctggatttaacagcccgtggaatcattgaaaaagcgggatacggtgactattttcctcaccggcttgggcatggactcggaatttctgtccatgagtatccatccatgagccaggccaacgatacactgttgcaggaaggcatggtctacacgatcgaaccggggatttatgtgcctgagatcggcggcgtgcgcattgaggatgacgttcacgtaacaaaggacggagcagttgctctgacccaatatccaaaggaattaatcatactgccgtaatagaaataaaaaaggactttgttctcgacatcgtccttttttatctgcattaaataaaaaaatcatcaaatgttcgaaagggtttaatttcatgtttttggttgagaggttttacagcaagacagctgccaccgagaacagtgagacataacccaattaaaatgaagaaacccatgtgatcttctcctttcagcttaaaacacaaaaagatatctggtacgtccatatcatattgtatgaaacgcattccagatcaaggggatttagaaagaagggaatctatggctaatattaaagacattgcagaaaaagccggtgtctctgttacaacggtttcccgagtcataaacaatcatccatacgtcagtgaagacaaacgaaaaagagtgtttgaggcaatggaatcattggagtacacgagaaatattcacgctgtacatttgtcgaaaggattttcaaacatgattggtgttgtcttgccaacggttaatctgccatattttgcagagctgattgcaggaatagccgacgcagccgcggaatccggggttcacctctctttattccaaacaaactatgaggtacaaaaagaaatctttgcgctgtcccaattaaagcagcgccaggttgacggcctgattttttgctcaaaggcgcttgctgatgagaaactcatggaatgggagggcccgattttgctttgccagaattcagataatgcccgcttcccaaccatcagcattcctcaccaagaagcatttcggaacggcttggactatttaattgccaaagggcacaaaaaaatagccatctgtttggcaagaaaaaaaggcatgaacagccattttcgaatcaaagcctacaaagaggcattggaagagatcggcgaggcatttcgtgaagactgggtaattgagaaagcgattacaattaatgatgggaaggcgctttttcataaatggaaaacgtggaaggaaaagccgacggctatttttgttgccaatgaccaagtctcagcagggctttttcttgaagcaaagaaccagcgggtgtcagtaccggatgagcttgcaatcttaagcgttgataaccacgaaatcagccaagcgcttggaatcacaacgatcgatattcagacaagggaaatgggaaagcaggcatttgccatactggaaaaaagaattcaaggacagccaattgaaaggaaagttctggattaccgtctcatcgaaagatcgactgtttagtgaatgcattgaaaaaaggtttgacgtgcattccgttcgttatgtacgatatgaggtattgaatgacaaaggagctgaggatcgtgaatgggtccttcacagtgaaaaaggtactgaataataacgtattaattgcttctcatcataaatacagcgaagtcgttttaatcggaaaaggtattggtttcggaaaaaaacaagatgatgtcattgaagataaaggctacgataaaatgttcattttaaaagacgagaaggaacaaaagcaatttaaaaagctccttgactatgttgatgaaaagctcgttgatatttcaaacgatgtcatctatcacataagaaataggactaatcactcattaaatgaacatattcacattgcgttgacagaccatatcgcatttgcgatcaaaaggcagcagcagggatttgatatgaaaaatccatttctaatggagactcagtcactatatcctgaggagtaccaaattgccaaagaagtcatagatatgatcaatgaaaaagcgggaatctgccttccggaaggggagattggttttatcgctctgcatatccattcagcattgacaaaccgtccgctgtccgaggtcaatcagcactctcagctcatggcgcagcttgtcgaggtgattgaagactcatttcaaatgaaagtaaataaggaaagtgtcaactatttgcggctgatcaggcatatcagatttacaatagaaagaattaaaaaagaagaaccgactaaagaaccagaaaaattaatgttgttattgaaaaatgaatatccgctatgctacaatacagcttggaaattgattaaaatcttgcagcaaacattgaagaaaccagttcatgaggcggaagcggtttatctgacgcttcatctgtaccgattaaccaataaaatttcataaattcagtttatccttataacgtgttactgattcgatcaggcatgagtgattgagggaaaaaaacgggaagttcattctcgttcttttgcgcacccaattttgctcatgcctttttgttgtgtaaaagggcaaatgtaaacggttaaactggaagacttacgcctgtgaattcgttgtcatgatttttagctgtaaggtcagactagtaaaaagaggaggtcaattcttatgtttaaagcattattcggcgttcttcaaaaaattgggcgtgcgcttatgcttccagttgcgatccttccggctgcgggtattttgcttgcgatcgggaatgcgatgcaaaataaggacatgattcaggtcctgcatttcttgagcaatgacaatgttcagcttgtagcaggtgtgatggaaagcgctgggcagattgttttcgataaccttccgcttcttttcgcagtaggtgtagccatcgggcttgccaatggtgatggagttgcagggattgcagcaattatcggttatcttgtaatgaatgtatccatgagtgcggttcttcttgcaaacggaaccattccttcggattcagttgaaagagccaagttctttacggaaaaccatcctgcatatgtaaacatgcttggtatacctaccttggcgacaggggtgttcggcggtattatcgtcggtgtgttagctgcattattgtttaacagattttacacaattgaactgccgcaataccttggtttctttgcgggtaaacgtttcgttccaattgttacgtcaatttctgcactgattctgggtcttattatgttagtgatctggcctccgatccagcatggattgaatgccttttcaacaggattagtggaagcgaatccaacccttgctgcatttatcttcggggtgattgaacgttcgcttatcccattcggattgcaccacattttctattcgccgttctggtatgaattcttcagctataagagtgcagcaggagaaatcatccgcggggatcagcgtatctttatggcgcagattaaagacggcgtacagttaacggcaggtacgtttatgacaggtaaatatccatttatgatgttcggtctgcctgctgcggcgcttgccatttatcatgaagcaaaaccgcaaaacaaaaaactcgttgcaggtattatgggttcagcggccttgacatccttcttaacggggatcacagagccattggaattttctttcttattcgttgctccagtcctgtttgcgattcactgtttgtttgcgggactttcattcatggtcatgcagctgttgaatgttaagattggtatgacattctccggtggtttaattgactacttcctattcggtattttaccgaaccggacggcatggtggcttgtcatccctgtcggcttagggttagcggtcatttactacttcggattccgatttgccatccgcaaatttaatctgaaaacacctggacgcgaggatgctgcggaagaaacagcagcacctgggaaaacaggtgaagcaggggatcttccttatgagattctgcaggcaatgggtgaccaggaaaacatcaaacaccttgatgcttgtatcactcgtctgcgtgtgactgtaaacgatcagaaaaaggttgataaagaccgtctgaaacagcttggcgcttccggagtgctggaagtcggcaacaacattcaggctattttcggaccgcgttctgacgggttaaaaacacaaatgcaagacattattgcgggacgcaagcctagacctgaaccgaaaacatctgctcaagaggaagtaggccagcaggttgaggaagtgattgcagaaccgctgcaaaatgaaatcggcgaggaagttttcgtttctccgattaccggggaaattcacccgattacggatgttcctgaccaagtcttctcagggaaaatgatgggtgacggttttgcgattctcccttctgaaggaattgtcgtatcaccggttcgcggaaaaattctaaatgtgttcccgacgaaacatgcgatcggcctgcaatccgacggcggaagagaaattttaatccactttggtattgataccgtcagcctgaagggcgaaggatttacgtctttcgtatcagaaggagaccgtgttgagcctggacaaaaacttcttgaagttgatctggatgcagtcaaaccgaatgtaccatctctcatgacaccgattgtatttacaaaccttgctgaaggagaaacagtcagcattaaagcaagcggttcagtcaacagagaacaagaagatattgtgaagattgaaaaataagggtgttagtacgccgtgcttgtcagatgacaagtacggttgtatgatataatattgtgaagtaataaagctttaagttaaaaggagaatgataaaaatggcacaaaaaacatttaaagtaactgcagattctggaatccatgctcgtcctgcgacagttcttgtacaaactgctagcaaatacgacgctgacgttaatttagaatataacggcaaaacagttaaccttaaatctattatgggtgttatgtctttaggtatcgctaaaggcgctgagatcacaatctctgcttccggagctgacgaaaacgatgctcttaacgctttagaagaaacaatgaaaagcgaaggactcggcgagtaatgcaagaattaaaagggattggtgcttcagccggcatcgcgattgcaaaagcataccggcttgaagagccagatttaacggttgaaaagaaaaacatctctgattctgaagcggaagtaagccgttttgatgaagcgattgcacgttcaaaaaaagagctcgaaaaaatcaaagagcacgctttgaaagaactgggtcaggataaagctgatattttttctgctcaccttttagttctcagtgaccctgagcttctgaaccctgtgaaagaaaaaatcagcactgattcagtgaacgctgaattcgctttaaaagaaacgtcttctatgttcgttaccatgtttgaatctatggacaacgaatatatgaaagagcgtgcggcagatatccgcgatgtaacaaaacgcgtaaccggccacctgcttggcgtcgaaattccaaacccaagcatgatctcagaagaggttattattgtagctgaagacttaacaccgtctgacacagctcaattaaaccgtgagttcgtaaaaggattcactactgatatcggcggacgcacatctcactctgccatcatggcacgttctcttgagattccagcagttgttggaacgaaagcggcgacaggcacgatccaaaacggcgtgactgttatcgttgacggtatcaatggcgatgtcattattgacccatctgcggaaactgtaaaagagtatgaagaaaaacataatgcttatttggctcaaaaagctgagtgggcgaagcttgtcaatgaaccgactgtctcaaaagacggacatcatgtagagcttgcagcgaacatcggtactcctgatgatgtaaaaggtgttcttgaaaacggcggagaagcagttggcctttaccgtacagaattcctttacatgggaagagatcagctgcctacagaagatgagcagtttgatgcttacaaaacggttcttgagcgtatggaaggaaaatcagtcgtcgtgcggacacttgatatcggcggagacaaagagcttccttacctgcagcttcctaaagaaatgaacccgttcctgggatatagagcgattcgtctttgccttgaagagcaagaaatcttcagaacacagcttcgcgcgctgcttcgtgcaagtacatacggaaacttgaaaatcatgttccctatgattgcgacagttaacgaattcaaagaagcaaaagcgatccttcttgaagagaaagaaaagctcgtaaaagcgggacaggctgtatctgacgatattgaagtcggaatgatggttgagattccgtcaactgcagtcatcgctgatcagtttgctaaagaggttgatttcttcagtatcggaacaaacgatttgatccaatacacaatggcagctgaccgtatgaatgaacgtgtatcttacctgtatcagccatacaacccggcaatccttcgcttaattacactcgtaattgaagcagcacacaaagaaggaaaatgggttggcatgtgcggagaaatggcaggagacgagattgcgattccgatccttctcggcttaggcttagatgagttctcaatgagcgcaacgtctatccttccggcaagaacacaaatcagcaaattgtctaaacaagaagctgagtcattcaaagagaaaatcttatctatgagcacgacagaagaagttgtcgcgttcgtaaaagaaaccttcaagtaatgtacaaaaaccagacggcctccggcctgtctggtttttttcataagtaagggcatagaaggacacaataacatggctaggagggatagtatgtcaaaccaatttaacgcaggagatactgtttatgtgatctacagaaatccgcacgctgccaatgtagctcacataaaggaagccgaaattgtgcaccatccataccatgaaggcgagctttccctgtttatttatgaaacctatcatccgttcgcagaggacgatgctgtgtttgcaagctatgaagaagctaaatcgctttacaaagaactgtttgatattgatccgtatgagtaacaaggaaatcattacaactcatatcctttccgcctagtgagaaaagtaacgttagtaaaggaaaaggatgtggcatcatgcagaacccatttgttccgcagcttgtgtatatagaaccgagggcgctggaatatccgctgggccaagaattacaagataaatttgagaatatgggtattgaaatcagagaaacgacatcccacaatcaggtgcgtaatatccctgggaaaaatcatcttcagcaatatcgcaatgcgaaatcaactttagttatcggtgtccggaaaacattaaagtttgattcatccaaaccctcggccgaatatgccattccgtttgcaacaggctgcatggggcattgtcattactgctacctgcaaacaaccatgggatcaaagccgtatatcagaacttatgtaaacgtcgaagagattttagatcaggcagataagtatatgaaggagcgcgcaccagagttcacaaggttcgaagcatcatgtacgtcagacattgtaggaattgatcatctgacacacacgctgaagcgcgccattgaacattttggccaaagtgatctcggaaagctccgatttgtaacgaaatttcatcatgtcgatcacctattagacgcaaagcataacgggaaaacgagattcagattcagtattaatgccgactatgtgattaaaaactttgagccgggaacttcacctcttgataagcggatagaagcggcagtaaaagttgcaaaagcaggctacccgctaggctttattgttgctccgatttatattcatgaaggctgggaagaaggatacagacatctgtttgaaaagctagatgctgctttgccgcaggacgttagacatgacattacgtttgaattaattcaacaccgttttacaaaaccggccaaacgagtgatagagaaaaattatccgaagacgaagctcgaattagatgaagaaaagcgccgttataaatggggccgttacgggatcggaaaatatatttatcagaaagatgaagagcatgcacttcgagaggcacttgaatcctatattgatacctttttccctaacgcaaaaattgaatatttcacttaaacgggctgttgtgatcaacagctcgcttttttataaaaaggatttttccattccatcaaaacgccgtaattcaatgattctttatcctccaaataattgctgactacacgaataggtgaacgcccgcaacggaggagaaaggacagcacagggtcgtttttcctgccttccatcacatcttcaacgtactgaacagcgctgatctcgtgtgcgtatttataatacaaaggaatgcggccgccgccgagaaggcgttccagtcttttatcaacagtcagctcatacatcgtattcatcagccattttccgattccaagctttcgataatgaggagaaacagaaatatccactacatataaagtatttccatgaggttcatgatttttaatcgatccgttgtcagttgcttgtgcccatgtatgatcaggagattcaggctcaaattgtacaataagagcagtcatggaaccgataattctgtcattgatgagcgcgcataaagcgccttccggaaaggttttgatatggctggcaagctggtcctctgaccacagcaattcctggggaaacggaggagggaaacattcttcttgaagagaaatcagcctctcgatgtcagtctcagtgtagtttctaatggtcagagcctcaaattttctgccgtcatgcacatacatttgttttagtatgatcatcactctccttatgttgtttcattataacgaagattgaattttcagtaaatatattccgattttcttataatttattttttgattattcatttttcaaacgaaagggccgatatagaaattaggaggggattggtttgtttaaaaaacttcacatgaagattgctgtttttgtttcgattatgttaatcatcacagttgttcttttaatgctgtcttcttatttgacgctaaaaccgatgattacagaggatgggaaaaatacaactcaaaacgtgacgcagtcacttgaacaaaatattgaattgcaattaaagagttatgccatttcgttatcaagattggctaatggggaattaacgcatacatttgtaacgaaaccaagtaaagaagcttctcggctgtttcacgatgacattaagcaaatcaaagataacgatgattatgttgcgatggcttacataggcaccgcaaaaaaagaaatgtttacatatccaaaagcggatttcgctgaggattacgatccaacatcaagaccatggtataagcttgcagctgaaaccccggatcaagttgtttggacggaaccttataaagatgtcgtgacaggagacatgattgttactgcatcgaaagcgatcttagacgggcaaaaagtgataggggttgccagctatgacttgaaactctctgctatccagagtatggtcaataaacaaaaggtgccttacaatggatttgcctttttagctgatgcgagcggcaatcttttagcccatccgtcaaatcaaggaaaaaatatatcaaaggatcaaacactgcaaaccatcgcatccgagaaaaaagggatacaagatgtgaatgggaaaatggttgtgtaccaaacgattggcgaaacgggctggaaggtcggaacgcagtttgataccgatcaattaatgtggatttcagataaaatgaatcgggcaaatctttggatatcattgattgcgcttatcataacaattattctcagctacttcctggccaaaacgataaccggcccgatacagcagctgatcgcaaaaacgaaagctgtttccgcaggcgatttaacagtgcgcgcggaatcaaaatccaaggatgaagtcggtattttaacaagagactttaatctgatggttgaaaatatgaaggaaatggttgagcaagtcagactctcttcagggaaagtatctgacacctctgaacaattaacggctgtctctgccgaaacaaatgaaacaagcggacaaattgcaaaagcgattgaagaagtagccgcaggggcatcggaacaggcttctgaagttgaaaccattaatgaaaaatcggaaagcctgtcaacgaaaatcaggcaaatcgctgaggaggcaggcggaattaaagaacgatcaaaatcgtccgaggatgcaagctataaaggacttgacgcgctcggccagctgctgatgaaatcaaacgaagccaatatggaaacgaaaaaggttgaaacgatgctgctggatttggaaaatcaaactaagaatattgaagaagtcgttacagcgatttcaaacatatctgatcaaaccaacttgcttgccttaaatgccagtattgaggcagccagagccggagaaagcgggcgcggttttgccgtcgtagccgatgaagtgcggaagttagctgagcaatcagccctttctacaaagcatatcagcgagactgtgaagcttatccagcttgagacaaaagaggcctctcacgcgatggttgaggcaagcagaatgaatgatgaacaaaacagtgccattcacgaaactggagaggtattaaatacgataactgcagaaatgcagtcactggtacaaggtattgatcacatttacgcggaaattcaaagaatgagtgaagaacagcttgcgatatctgaagctattcaaagcatttcagccatatcacaggaatcagctgccgcagcagaggaagtgaacgcatcaaccgatgaacagcttgtcacccttgagaaagtcaaacactcaacggaaacactaaaacatgcaagccaagagcttatgaacacaattgcaaaattcacattgtaatccaattacatccccaaacatcatttgttttggggattttttattttataagatgaatagatatggtagtctagaaaatgaaggaaaaatgataaattttaactaaaatctaaacgaaacatctgggaggaatgaccttgaaaaaaacaattggttttatcggtcttggagtaatgggaaaaagcatggcatcacatattctcaatgacggccaccctgttttggtgtacacccggacaaaagaaaaagcagaaagcatacttcaaaaaggcgcgatctggaaagatacggtcaaagatctttcgaaagaagcggatgttatcatcacaatggtcggctatcccagtgatgttgaagaagtgtatttcggaagcaatggaattattgaaaacgcaaaagaaggcgcatatcttattgatatgacgacatctaagccttcgcttgcgaagaagattgctgaagcggccaaagaaaaagcattgttcgctttagacgctcctgtttccggtggagacgtcggtgcacaaaacggaacactcgcaattatggtcggtggagaaaaagaagcttttgaagcctgcatgccgattttctctttaatgggagagaatattcagtatcaaggaccggctggaagcggacagcataccaagatgtgcaatcagattgcaattgcagccggtatgatcggtgttgctgaagcgatggcttatgcccaaaaatcaggcctagagccggaaaatgttctgaaaagcatcacaacgggcgcagccggaagctggtcattgtcaaatcttgctccccgtatgctgcaaggcaactttgaaccgggattttatgtgaagcattttattaaggatatgggaatcgcactagaggaagcagaattaatgggggaagaaatgccaggcttgtcgctcgcaaaatccttatatgacaagctagctgctcaaggtgaagaaaacagcggaacacagagtatctataagctttgggtgaaataaaaaaagattgcctgtacgaaacaggcaatcttttttttattattttccgatgaattgttgtgtccagatgcttccagactcaacgtagccaacaccgatgtgagtaaagttagggtttagaatgttttttctgtgtccttcactgttcatccaagcttttactacttcttctggtgtcttttggcccttcgcaatgttttcacctgctgttttgtagctgattccgaaagatttcatcatatcaaacggtgagccgtatgttgggctttggtgatcaaagtagtttttgtctttcatatcctgagattttgcgcgtgcggatttgcttaacgtttcatcaatttgaagcggctttaatccttgtttttgtctttctgcatttgtaagttcaacaacttttttctcatatgcacttacagatgaaggtgcagatgttgttgtgtttgttttttcagcagttgcaggtgctttagaagcagtgttttgatcagcagctgctttttcagtagtcttttgtgcaggttttgccgtttctgtcttttgaacatcctgaactttcacgttagattgcttcgcatgtttttgaagaagctgcttcatctctttttcgtttgcagcgtttaacgttttgatatttgtgttaatatgcagctttttcactgcatcgttaagtgacatgttttgtactgtgttccccgtttttactgtaaccacaggctggcaggagagttctttcgctgatgcttgctgtacgcccccgaatgtgaataatccaaccgcagcggcagcagataaaataaatgctttcttcattagttcgtaacctcctagagttgtttgtttctacagaaaaatcataacatagcttttttgtcataaagattccagcactttcctttgacaaatagagattgtcattttcgtaaagtaaatccgttgaatcactaagaataagggaatcagcggtatatatgattttatcgtaccgttacatagcttccttttttttgaaccgttagttatattttaatgtgtttttatattgacagcttttttttactccttttcgctgtaacaactattacaaaggtgttacaattaatctcagtatatgtaaatatattgaacgatttgagaggggtaaccagaagtgactgaaataggacgtgaaccaaagaaaaagagcaaaggaaacagagcaatcagaatgaacctttttttcctagctgtctttgttctattcactgcattaatttttaagctcggggttgttcaaattgttgaaggcgaacagcatgaagaagacgctgagaaatcaaatgcaaaaacagcttactatcctgcgcctcgcgggaagatgtacgacagaaaccagaaagttgctgtcgacaaccagagcgttccagaaattgtgtatgtatcaacatctagcacaaaaacagaagataaaatcaaaacagcgaagcggcttgcttctttcattcatattgataccgaatttttgaaggaaagggatctttgtgattactggatcgcagctcatccgaaaaaagccgccgctctgcttaaggaatcagaaagcaatctgaaaggagaccaagcttacaagcttcaaatagagcgtgttccggatcaagaattaaaggctattcagcaagatgacgaagaaatggaaactgctgcgatatatacaaggttttcaagcggaaatgcttacgaacctcaaatcgtaaaggcaatgaatccaaataagagcaatagcaatggaaaaaacggagcgctgcttgatgagaagaaaaactcctcgcaaagaccaaaaaatgacttaacatatgatgaaatttccattgtttctgagcatttagaagaacttccgggaatcgatatcgtaaacgattggacacgaaaatatccttatgacaaaaccctttattctgttttcgggggcgtcacgacacctgatcagggcctgctgagcgaccggaaagatttctacttaacaagaggctatgcgaataatgacagggtgggaaaaagttatttagagtatcaatatgaagaatatttaaattcgcataaagaaaaagtggaatacgtagaagataataaaggaaatgtcgtcagccaaaaaaccattgataagggcagcaggggatacgatcttcagctttcttttgacatggagcttcaggcaaaggtagaaaagattattgaagaagaagtaagaaacagccgtgcacgcggaaattacatgcttgacagagcctttgccgtaatgatggacccgaataacggcgatattttatcaatggcagggaaaaagatagatttaaaaaccaacaaaattgaagattatgcgataggggcatttaccacccaatatgaaatgggatcagcagtaaagggggccaccgtgctagccggctatcaggacgggatcccgcattataaatattttgttgacatgccactgtattttgcaggaaacggtaataagcctaagaagtcctatatgaatatgggaactattaatgaattaacggcattgcaaaaaagctcaaacgtatacatgtttaatgtcgccatgcacattgccggtgtcacatacaagccgcatggacctcttcctgctgaccagaaggatttaaacaaaatgagaaattactacagccaatttggcctgggagtaaagacaggcatcgatctgccgcaggaatcagccggtatgcaaactacacctgatgcggtaggggggttaattttagacttggccattggacaatacgatacatatacaccgcttcaaatggctcagtacatctcatcaattgccaatggggggtaccgcattcagccaagaattgttacaagtgttcatgagcccagcaaaaaagaaggccttgggaagaccattgaacaaagaaagccaaacattctcaacaaaattaacaactcagaaagtgacattcagcaggtgaagactggaatgaagctagttaccacttcgggaacagctagaaatacgtttgcagaggatgtttccggaaaaacaggaactgctcaaacattttattacggaacaaatcgtaattggtggggaaaaagcacgtacaatctaacatttgtcggctattatccgtcaaaaaatccaaaagtggctttcagtgttgttgttccttctgtagcgaacgaccacgacccgatcaacaaactcattgccaaaagagctatccacgcctacgcagagctcgaaaaaaaacacagtaaaaaataaaaaacagggtgcacaactaaaagattgtgtgccctttcttttattcaaaaattgacgttcaccataagaatagaaggagaatactcattttctagcgaatcatactaggtaaaagtcaatctgtatatgtcgaaacacgatgatcatgcaaaggagggattctgtggaacaggatacgcagcatgttaaaccacttcaaacaaaaaccgatattcatgcagtcttggcctctaatggacgcatcatttatatatctgccaactccaaactgcatttgggctatctccaaggagagatgatcggatcattcctcaaaacgtttctgcatgaggaagaccaatttttggttgaaagctatttttataatgaacatcatctgatgccgtgcacctttcgttttattaaaaaagatcatacgattgtgtgggtggaggctgcggtagaaattgttacgacaagagctgagcggacagaacgggaaatcattttgaaaatgaaggttcttgaagaagaaacaggccatcaatccctaaactgcgaaaaacatgaaatcgaacctgcaagcccggaatcgactacatatataacggatgattatgaacggttggttgaaaatctcccgagtccgctatgcatcagtgtcaaaggcaagatcgtctatgtaaacagcgcgatgctctcaatgctgggagcaaaaagcaaggatgctattattggtaaatggtcctatgaatttattgaagaagaatatcatgatatcgtgaaaaacaggattatacgaatgcaaaaaggaatggaagtcggaatgattgaacagacgtggaaaaggcttgatggcacacctgttcatttagaagtgaaagcatccccgaccgtctacaaaaaccagcaagctgagctgctgctgctgatcgatatctcttcaaggaaaaaattccaaaccatcctgcaaaaaagccgtgaacgatatcagctgctgattcaaaattccattgataccattgcggtgattcacaatggaaaatgggtatttatgaatgagtctggaatttccctgtttgaagcggctacatatgaggatttaattggcaaaaacatatacgatcagctgcatccttgcgatcacgaggatgtaaaagagagaatccaaaacattgccgagcaaaaaacagaatctgaaattgtcaagcaatcctggttcacctttcagaacagggtcatctatacggagatggtctgcattccaacgaccttttttggtgaagcggccgtccaggtcattcttcgggacatctcagagagaaaacaaacagaagaattgatgctgaaatcggaaaaattatcaatcgcagggcagctcgcggcgggaatcgcccatgagatccgcaaccctcttacagcgatcaaaggatttttacagctgatgaaaccgacaatggaaggcaacgaacattactttgatattgtgttttctgaactcagccgtatcgaattaatactcagtgaactgctcatgctggcgaaacctcagcaaaatgctgtcaaagaatatttgaacttgaaaaaattaattggtgaggtttcagccctgttagaaacgcaggcgaatttaaatggcatttttatcagaacaagttatgaaaaagacagcatttatataaacggggatcaaaaccaattaaagcaggtattcattaatttaatcaaaaatgcagttgaatcaatgcctgatgggggaacagtagacattatcataaccgaagatgagcattctgttcatgttactgtcaaagacgaaggggaaggtatacctgaaaaggtactaaaccggattggagagccatttttaacaacaaaagaaaaaggtacggggcttggattaatggtgacatttaatatcattgaaaaccatcagggagttatacatgtggacagccatcctgaaaaaggcacagcgtttaaaatttcatttccaaaaaaataaaacaacggcttaaacgccgttgtttatcgtctgcattgcttcacgtttttttaatacaaataattctaaacggttcaggccttctctcagcgtgtccagcgagtacgcaaaagacaatcttacatatccttcaccatatgttgagaacgagctgcccggcacgagtgccacaccagcgtcttccaaaagagccatactaaaatcaaatgaagtcattccaaatgatttaatagaagggaagatataaaacgcaccggacggtttaactacgtcaagtcccatagaaacaagacggtcataaacatagtcgagacgttttttgtattgttctctcataattagtgcatcgtcaaagccgtttgtgacagcttcaagcgcggctttttgagaaatggatgaggcacatgacacattgtattgatgaacctttaaaatgtgctttgcaatgtctttcggtgcgaataaaaatccaattctccaaccggtcatgctgtgtgattttgacaacccgttaatgacaatcgtttgatcccgcaaataggttgcgatggagtaatgcggtctgtcatatgttaattcactgtatatttcatcagacaatacgaagacatttctgccttttaagagagctgcgatgcttttcagttcttcttcagataaagtcacgccggtaggatttgacggataaggaagcacgacacacttggtgttggatgtcagagcatcttcaatcagccgggcggtaagcttaaagccgtgtgacgtagtatcaacaatgacaggcttggccccgcacaaattgataataggttcatagcctggataaataggtcctggcataatgacttcatcaccgggagataaaatcgtccggaatgcagcatcaagggcttggcttgcgcctgttgtgatgataatttctgattcagcatcatagttgaaatccgcttttttcttcatataaagctgaacagcttgtctcagctccaggtagccggcattcggagtatatgacgtcacgttttcatcaatggctttttttgcggcagctttcacatgatgcggtgtgaaaaaatcaggctggccgattgtaagtgaaatgacgtcttcgtgttgggctacaagattcgagaatttgcgtattcctgaaatttcgatctctcttgctttcggattcagcaaatgttccataattcatcaccttaacaaatataatgagtttatcctattttaccactagctgatcatttgtcacctttttaactgatatatttcgattgtatgcgccttttttctaaacatacctttcttttcagaaaaaaagaagacaaccagcgatttgattgtctttattgtatcatgttctattattgtttatatgtgccaatttcattaatagccataatcaaaatgaaggtcttcgtgccaaattagatacggaggatgctcttcttgaaggtcagctgattctttcttcatattcaggtaagtttcttcactgatatcctctaaaacagtcatttcgttttctttaaatattactaaggtacccattatttacacccttctttggaaaaatccttgactattttatcactgttagttggaaagtcaatggttattaggaaaaaagtttcttttttgaggaacgcggcttgttgccttcggaattcgattttgaagagctgccattcactttttacaaattacgccgatatatacagtacaatactgaatgcgaatagcgagggattgaattgtcgttacaacaatacgaaattttattggattctggtacaaatgaattagaaattgtgaagtttggcgtgggtgaaaatgctttcggaattaacgtcatgaaggtaagagaaattattcagcctgtcgaggtgacatcagtgcctcactcccatcagcatgtagaaggaatgattaaactcagaggagaaatcctccctgtgatcagtctcttctcattttttggagtagagcctgaaggatcaaaagatgagaaatatatcgtgactgaatttaataaacggaaaattgtttttcatgtcggctgtgtttctcaaattcacagagtatcctgggaagcgattgaaaagccgacatcgttaaatcaaggaatggagcggcaccttaccgggattattaagctcgaagacctgatgatctttttgcctgactatgaaaaaattatttatgacattgaatcagattcaggtgtagacacgtataatatgcataccgagggcttcgatgaaagaagaactgataaaaagcttatcattgtagaggactcaccgcttttgatgcgcctcttgcaggatgaactaaaagaagcagggtacaacaatatcgcttcgtttgaaaatggaaaagaggcatatgaatacattatgaaccttgctgaaaacgaaactgatttatcagaacagattgatatgatcatcactgatattgaaatgccaaaaatggacggacacaggctcacaaagctgctgaaggaaaatccgaaaagctcagatgtgccggttatgattttctcatcgttaattacggatgatctgcgtcaccgcggcgaagttgtaggcgcagatgagcaaatcagcaagcctgagatcagtgatttgattaaaaaagtggatacgtatgttattgaataaataaaaacagccgttgccagaaagaggcacggctgtttttattttaaaagtaactctcgccaagttttttaaagaccggtttatggtaagctggctgctggcgatttggcactagcggcttttctttcatgccgacatattcttgcaataggtgtttcgcttttgttaaagacatttgagctttaggatttcggtacgattgattaagtgtacctaaatgcggaagatgttcgaagtcttctttagttggaggcatgtgaaaatagtagtctccgattgagataagcacgtccgattgctgttggctgaaccttggattttttgaaaaatgaagccctattttctttcctttaccttctttgacaagcttttgcaaagcccgttttttcagcagatataggtatttagggttgggggcggtttttgcatggcggttcacagtgtaaactgcttttgaaagattttctacggttggctgcagatctttcgtatatgcatggtcgtccattatttctctcctttgctcttatcaatttctatatgtttagattatacttttttaaagttgaaatgcaaatattgaatgtaaaaatgcgcttttttctaagaaaaaaagcgcatttttaacctgcattatacagatcttgccttctttttcggctgttcttgaaatgcttcctgaacattcacttccacagcctgagcactgtattttggcagtgcaataaaataaaaaataaaaacgagcaggataataacacccatcccgtaataaagataatcaatgtttgaaacaaacttagggaataacagtgcgactaagccgagtgtcaaagactgtgcaaacatcataaaagggtcctgcatgccgcttacacgtcccatcagttttggatgaacaatttttggcatccaccctccgattgcaatgttgatcggtccgatgcacattcccagtgcaaaagctgccgcgtaatacacccataaaatattggtgtagccgaggacgaagatcagcaaacctgcaatgaaaatcggtatcgacattaaaaagtgcggcttcacttttttagagatgatcgtgccgattacgctgcctgccagcagcccaaacccgagtgcgatcgtaaatacagacgtatgccactcataacggtcaggcgccaatccatatttcattgtaaacatcggcaaaacggcgaatcctccattgacaaatccaaaaatgaagaagccaaaaataagagatgccagcaatttgttttttaaaatatagaggatgccttctctaaagtcatttattgaatccttaacagaagtctttctccagctgaatgcaccgtttggctgtcgggcttcttttggaatccggcagctgcggatcagcagcccggaaatgataaagctgacaaaatcaagaataatggcgccttcaataccgatggtgttgtacataaacgcgcctataccgaccccaaacaccataaaaatgctaaaaagcatctgattaagtcctgccgctttcacataatgctccttcggcagaatggcttgtaccaaactgttttctgccggaaagaaaaactttgttacagcgcttctgataaataagatacaaaaaacaagaggaatattgccggtaaataaagtgaaaaaaagcacgacagtcaggcctgctctgatccaatcacaattttctgccaccttttttctgtcaaaccggtccgcgacgactcccacgatcagaaatacaaatatggtcggaagagaatacatcagctccgccaaggtcgtatatgaaggctggctgctgaatcggtccagcaaaaaaaaagcaaaggccatgttgcctactgtcgtgcccatttgagaagcgagtgctgcgaaaaatagacgaacaaaattacgatttttaaatatatccataaaaacgctccttaccctaaaggtcccactttatcatattataaaccgcctgtttttgaaacaaataagaaaacattaccggttaatcgtgactctcgttccgtttggcacaattgaagcaagttcgatcacgtctttgttatgcatgcgaatgcagcctttagaaacagccttaccaatcgaagcgggattattcgtcccatgtattccgtagtgctgctttgaaaggctcagccaataagcgccaaatgggccgccgggattgcgctggcggttaataatgtaaaactcgccagtaggcgtttgcgttagtattttaccaacggcgatgggataggttttcattacccgattatttaggaacagcgtaagggtcttcgctccgattgagactgcgatatgatacggaattgtataagggtccggcagtccggggatgactatggactgtcctgcggtgagccctgcctgcagtgacggattagcctggagtaatgcagccgtgctgattctgaaatcagccgcgatgctgttcagtgtatcaccttgcttcacctggtacgtaagcagtttcctcatcctccttttttacttataagtattgatggggagcccatcctgctacattaatttgctttttaaggtgaagacagtgatttcaggcttggccagaaaccgcaaaggcagcctggtcatcccgaggcctcggtttacgtaaatatgagtgctgcccgtttgatacattccctctgtgtagacttttccatatggaggcgtaataatcggtccgtaaaaaggcagctgaatctggccgccgtgtgtatggccggaaagctgaaggttcacgggataatctgttgttttcaaggccgcatcaggttcatggacgagaagaatggaaaaaagtctgtcgctcagccttgaaagggtgccttcataatctgggtttcccagcattaagtcatcaagcgaagcaatctcgattttgctgccatctgcgagtgacaatgtttgatagccattgcgatataccgtgaaacctccggccgtcatcaggcttttgtaaacggcagttccatagcctccgtgatcatgattgccgtaaatacaaagcttgccgaagggagcattaagctttctcaataatggaatgactgcctggtggtgctgatacgtatcaggattatcaataatatcacctgtaaaaacaatgagatcaggtttagattcattaattgtaagaatgacagtttttaaatcttcgagagtaaagtaatcactcaagtgtgcatcgctgaactgcacgattttaaaaccgtcaaatccgtgcgggatgagagagctttttattgtgtgttcggttgtctcgatcatatgcggctcgagatacctggcatagccatatcccccgccggccgttaaagccccggcagcaagagcgccgaacattccttttagaaattgtcttctggacatctttttcatttcaaaccaacctttaatagagtttttctattatatcatctgtatctgataaaaatctcatatgagcatgtgctgacagaggcagggatataatgatagaatattattgaatgaatactcattcacaattggagggataaacatggaaaaaaaggcggtaattattaccggcgggtcaagcggaatgggaaaagcgatggcaaaaaaacaggctgaattagggtggcacgttatggtgacagggaggaaccatgaagcacttgaggaaacaaaaaaagaaattgagacctttgaggggcaggtcgcttgttttcaaatggatgtccgttccgattccgccgcttcagacatgataaaagaagcgataaaagcctttggccagcttgacgcgctaattaacaacgcggccggaaactttatttgtccggcagaaaagctgacgcccaatggatggaaagccgttattgagattgttttaaacggcacatttttttgcagccaagcagcggcaaggcattggattgaccagaagcagcagggtgtcattttaaatatggcagccacgtacgcttggggagcgggagcgggggtcgttcattccgctgcagccaaagcgggggtattgtcattgacaagaacgctggccgttgaatgggggagcaaatacggcattcgcacaaacgcgatagcccccggaccgattgaacgaacaggcggtgcggagaagctatttgaatcggaaaaagggatggcccgcacgatgaacagtgtgccgctcggccgattgggcacaccggaggaaatcgccgctttggcagcgtttttgctttctgatgaatcatcctatataaacggggattgtatcacaatggacggagggcaatggctgaatccttatccgttttaaagaatattaatctttggattcaatgtggtataatcagacaaagatagagaagcaggtgataacatgttggatccacttgatattttaacgaacattgatgatgtccttccatattaccaggcgatttttagtgccgaggagcagaaggttgtcggatatgaggtgcttggacgaattttggcagattcagaaatccaaagtctcgggcccttctttttagatgcggggatacccgaagaatataaattagaggttgataacagaattatccgccaggctcttgaccgctttttagagtcggattctgatctgctgatttttatgaatcaggatgccaatctgctgatgctggatcatggtgaaagctttctggagcttctgaaagaatatgaagcgaagggaatcgaactccaccgttttgtgcttgaaattacagagcacaattttgaaggggatattgagcagctctaccatatgcttgcatactatcgtacatacggaattaaaatcgcagttgacaacatcggaaaagaaagcagcaacttggacagaatcgcgctgctctcaccagatctgttaaaaatcgatttgcaggcgctgaaagtgtcacagccgtcaccgtcatatgagcatgtgctgtacagcatatctttattagcaagaaaaatcggtgcggcgctgctgtatgaagacattgaggcgaacttccagcttcagtacgcctggagaaacggaggccgctattttcagggctattacttggtgtctccatctgaaacgtttctagagagagatgtattgaaacaaagacttaaaactgaatttcaccaatttatcacacatgagaaaaagaaactggagaccgtctatgagcactctgaacagttttacaaacgagtgcatcaggctgtgacctctttgagaaaaaacaatctgtcttctgatgatgactttattaaaaagctggcggaagagctgacagattgcagcttcaggatttacatgtgtgatgaagaaggcgatcagctgacgggaaatgtgtttaagcaagatggagaatggatttatcagccggaatatgcggaaaagaactggagttggcgcccttattttctggagaacattatgagaatgagaaatctcagaaaaggttttttcagtgatctgtacagtgatttggaaacaggtgaaatgatcagaacgttttcatatccgatggatgatcagatgtatttatttatagacttgccttattcttatttatatgagcaggacggactgatttaacggctgaaaggccgttttttttatgaaatgaaaaaaatatcaaaaaacgattgacattgatactgagaatcattatcatttaattatagagagaagctactctctgttccccaacccctctatcagatcaagatccgaaaaaacttggcgctacccccgccaagttttttatttgtcaaagcataggacaatccaatgaaacaataaacctaactagtggtaaacgtttaacactgggagaaacattcagtgccgaacacccctgacactgctgcacgggtgaggaggaaaattcgttctgaaatgtttatttcagttccgttgtttgcctctatccagcatgactcccattgattatggccacgcgggacttcaccataacattcaaaagaaggttttgacaaagttgcaaaaaggcattcttaatgctgccaaagattcgaaaaaaattataattgtgtgcatgacattcaaaaaaagcctcaaactaaagaaaaatcgtttttttcactttttttctttgcttaaattcagcagtgaaaatgccatcctgtccgactttatggtatgatgctcaatagaacttgtattataataaatacttgttgatttgaagttgctttttgaaaggagtctttttttagaatgtcacaattaatgggtatcatcacacggctgcaaagtctgcaagaaacagcggaagcggctaacgagccaatgcagcgttatttcgaagtgaatggtgagaaaatatgcagtgttaaatatttcgaaaaaaatcaaacgtttgaactgacggttttccaaaagggtgaaaaacctaacacgtatccgtttgataatatcgacatggtttccatcgaaatctttgaacttcttcagtaagattcctgaaatagggggaacaagcttccgcctttgcaaaagtaatcgaaataaacggtaaggaacatacttgtttcatggttgtaaatccttgaaaaggagtgtcgtgatggctgattcttttctgttttataatctttcagaagcacagatgacctttcaagatgtgatggaacggcttaaagcctttgttcaaaaggacccccgttcttcttatgtgttatcgatcggaaccgattcacaggtttaccgcgattacacaaagtttattaccgcattgcatttgcatcgtacaggcaagggagcttggggctgcttaaaaaatcatacagtcgacagacccatacatagccttcgggagaagatttcgttagaaacggcgtacagccaagaaacggccgctcatattcttgatggacacttaatggatattaccgatctgctcctgccctttaccggtgagggggcggatcttacctttgaagttcacttggatattgggaaaaaagggcttacaaaagatctgatccaagaaatgactggacgtattacctccatggggattgaggccaaaataaagccggattcatacactgccttcagctatgcaaatcgtttcacaaaataatttggctgaaaaagccaaggtaaatgtcgaattatgcggttgacgtttgttatctgattacttattctagcggtagagctgaaagtaagttgtcttgctttcagaggtattcagtataaaacagggggcctgattgcgaatgagtcttatcggtgaacgatttacagaagaagaacaaaaacttctgctgaatatcctgatcaaccatgagtatgccatcgagctattaagcagtgagatcaacgatatagagacagggaccaaaaacgttgacggaaccacctacaaaaaacttgtaacgctatacgaccgatttcgatttgaaaattaatgggacaccctataattgatactccacaaagagtatcttttttattgaaaggaaacttttcgacaaatactgataaagtttatattattgcaatatagggaatgtattgatgatgaaaatgaaaaggggtcgaaaacatgataagcttacaatcagatcaacttcttgaggcaacagtcggacaatttatgattgaggcggacaaagtagcgcacgtgcaagtcggaaataaccttgagcacgcattattagtattgacaaaaaccggatacacagccatcccggttctggatccttcctaccgtttacatggcttaatcgggacaaatatgatcatgaacagtatttttggacttgagcgaattgagtttgaaaagcttgaccaaatcactgttgaggaagtcatgctgaccgacattccgcgccttcatatcaatgatccgattatgaagggattcggcatggtcattaataatggatttgtctgtgttgaaaatgacgagcaggtatttgaagggatttttacgagaagagtcgttttaaaggaattgaataagcatatacgctcgttgaataagtaggctgtacggcctatttttattatatagccagagcgaaaaaaagaaagcgcatacataatttaaacgagaatagggcttgaataagaaactaagattttattagaatgggagataagaaaaacttattgataacaaaaaggaggacgacatgcagcttcaagagcttcatatgctcgtagttttagctgaggaattaaatatgagaaaggcggcagaacggctttttgtatctcagccggctttatctcagcgcttacaaaccattgaaaaggcgtggggaacaaaaatctttttaagatcccaaaaaggattaacggtaacgcccgccggtgagaaaatcattcagtttgcgaatgatgtgacattagagcaggaaagaataagagaaaatattgacgagcttgaaggtgaaattcacggcacattgaagcttgccgtcgcctccataatcggtcagcattggctccctaaagtcctgaagacgtatgttgaaaagtatccgaatgcaaagatctcgctcataaccgggtggagcagcgaaatgctgaaaagcttgtatgaggatcaggttcatatcggcattataagaggcaaccctgagtggaaggggcgcaaagattacttaatgacagatcatctgtatttagtggatactgaaatttcctgcatcgaagatattgcccatacagaacggccgtttatccagtttaaaagtgacagcacttattttcaggaaattcagcactggtggcatcaaaaatttaaaacgtcgccgaaacagacgatattggttgatcagattgaaacgtgcaaacagatggcactgcacggaatcggttatgccattttgccgtctgttacccttcaaaatgaagataaagtgaataaaatgcctcttttagacatgaaagggcatccgatcggtcgggatacatggttattaggttatgagcctgcctttgaactgaaacaagttcaagcttttgtacaagtgataaaggatatgctggaccaggaaaatccattttaaagacagcgaggtgctgtctttttttttatttatctgttgacaatgaaaatcattatcatttaaagtgatacatatgatattgaaaatcattatcaattaatggggtgataacatggctaaagccttgattacatatgccagcatgtcaggaaatacagaagacattgccttcataataaaagatacgcttcaggaatatgagttggatatcgattgtgtcgagatagatgatatggatgtgtcttgcttaacctcctatgattatgtactgattggcacctatacatggggggacggcgatttgccctacgaagcggaggattttttcgaagaggtcaaacagcttcagcttcatggtttaaaaacagcctgcttcgggtctggcgattattcttatccaaagttttgcgaagcggtgaatttgttcaatgccatgctgcaagaggcgggagctgctgtttaccaggaaacactaaaaattgaattagcgcctgaaacggatgaagatgtggaaagctgccgagcgtttgcgagaggttttcttgcatgggcagattatatgaacaaggaaaaaagccatgtttcataaaggagcaactgctgttacggcatcggcgttttctggatattttgtggcggtacaaagagaaggcatttttcattattctttggagcagggctggagaaagctttttcgtttgaaaagtaagatacactgtatcagctacatagggccttacttatttggtgttggtgaaaagggaacagtcattcgttcggctgatgaagggaaaacctggacgatgtcgagctttccgacaaatgcaacagtgtgggcgattaccggcagaaacaacgggtttgtctgcgcccacggtaagcattgtatttatgtatcggatgattttggtgtctcatggcgcgtagccaaaccttttgccgaatttcataatccccctgttatccggtcgctatgccttcacgggggcaatctttttattggcacgcaaatacacgcatattttggcggcatttgggcttacgacattaagcgtgacactgtccaaattgtcaaaaaagaaaaaaaacggatgacggcatccatgctcgtgttcaatgaaaattggctggtggcggcgatgggttctgtgaaaggaaagcacggtgctgtcactgtacggaatcttttgaatggtgaagaattcaccatacaatccagtatgatcagaaatgaagaatcatttcttgatctttcagaggatgatggcattatatatgtcactacaacacaagatgaaaatggtttttcgagaatttaccaggttgatctcgaagcccgatcgttaaaatggttcgataccattaaggggcatggatggagagtggccaatcagaaagagaatttcttttgcgcaggcttgtatgaatgtaaatttgtccagccgtacgaagtttcagcaatgattcattagaggaggaacaaggaattggcgaagattttgctcgtttatgcaacaatgtcaggcaacactgaagcaatggcagatttgattgaaaaggggctacaggaggcggaagcagaagtagaccgtttcgaagcaatggatattgatgatgcccagctgtttaccgattatgaccatatcataatgggaacctatacgtggggagacggagatctgcctgatgaatttttagatctggctgaagacatggatgagattgatttttccggcaaaacatgcgctgtatttggttccggtgatacagcatatgaatttttctgcggagcggttgatacgctagaggcaaaaataaaagaacgcggtggagacattgtgctgccttcggtaaaaatcgaaaataatccagaaggtgaagaagaggaagaattaataaacttcgggagacaattcgcaaagaaaagcgggtgcgctgtctgatcactcactgggaactgctaaaacggctgttcctttttttcttgtctttgtatctttcctttgatacagtaatgaggtagaaaatcaggaggaggactatacatatgaaaatgatggacgcaaatgaaattatttcatttattcaaaatagtacaaaatctacacctgtaaaggtttacgtgaaaggtgagctggaaggaatcaatttcggtgaatctgcgaaagcttttatcaacggaaacactggtgtcgttttcggtgaatggagcgaaatccaaacagcaatcgaagaaaaccaaagcaaaatcgaagactatgtggttgaaaatgaccgccgcaattctgcgatcccaatgcttgatcttaaaaacatcaaagcgcgtatcgagccgggcgcgatcatccgcgaccaagttgaaatcggtgataacgcagtcatcatgatgggtgcttctattaatatcggttcagtcatcggcgaaggcacaatgattgatatgaacgttgtgcttggcggacgagctactgtcggaaaaaactgccatatcggcgcgggttctgtacttgcgggcgttattgagccgccatccgctaaaccggttgtgattgaagacgacgtcgtaatcggcgcaaatgctgttgtgcttgaaggtgtaacagtaggtaaaggagctgttgttgctgcgggagcgatcgtggtaaacgacgttgagccatacactgtcgttgcaggcacaccagctaaaaaaatcaaagacattgatgaaaaaacaaaaggcaaaactgaaatcaagcaggaattacgccagctgtaaggaaaagtttgataaaaaaggcgtggataatatatccacgccttattcgtataggcaggaggaatagaaatgaagaaagaggagctcatcgcaattcgcagagatctgcatcgtataccggagcttggatttcaggagttcaaaacccagcagtatttattaaatgtcttggaacaatatccgcaagacagaattgaaattgagaaatggcgaacagggctttttgtaaaagtgaacgggacggcgccggaaaaaatgctggcgtacagagccgatatcgatgcgctttctatagaagagcaaactggtcttccattcgcatcagagcatcacggcaacatgcacgcctgcggtcacgatttgcatatgacgattgcactcggcattattgatcattttgttcaccacccagtcaaacatgatttgctttttctgtttcagccggcagaggaagggcctggcggtgcggaaccaatgcttgagagcgatgtattaaaaaagtggcagcctgatttcatcactgcgcttcatattgctccagagcttccggtaggcaccattgcgacaaaaagcggccttctatttgcgaatacatcagagctagtcatcgatctggaaggcaaagggggacatgcggcatatccgcatttggctgaggatatggttgtagcagcaagtacacttgtcacccagctgcaaacgattatctctagaaacacagatccgctagacagtgctgttattacagttggtaccattaccggaggctcggcacaaaatatcattgcagaaacggcccacctggaaggcacgatccgcacgctttctgaagaatcgatgaaacaagtaaaggaacggattgaagatgtagtgaaaggaatcgaaatcggattccgctgcaaaggaaaagtgacatatccgtctgtatatcaccaagtttacaatacgagcggattaacagaagaatttatgtcttttgttgctgaacatcaactggcgacagtaattgaagcaaaagaagcaatgactggagaggattttggctacatgctgaaaaaatatcccggcttcatgttctggctcggcgctgattctgaacatgggcttcatcatgctaagctgaatcccgatgaaaatgcgatagaaacagcggttaatgtcatgacaggttatttttctgtttatgccaattaagcacaaatgaaagaataaaattccataaaatgagcactctagtaaacggaggtgttcaaaaatggctaaaaaaattggaattgaacaatcgttatcagatgtagaagctgctttaaaagaaaaaggatatgacgttgtaatgatgaaaagccctgctgatgctcaaggctgtgactgctgtgtcgtaacaggtcttgataataatgtgcaagggatagccgatacggtaacacaagcacctgtcattacagcttccgggatgacggctgaagaaatttgcagcgaagttgaaagcagaattcagtaatataaaaaccgaagcaaaaagcttcggttcttttatttattctgtttctttagggaaagcgcggtcgaacgcgttctttatttcttttctcaacactcgttcgactcgccactgttccatattttctgttttggcaatgaccctgattacaatttcggaagtccccagttcttgaatgccgatgacatttgggccttcttttatttgtggaagagccgctgcagtttcatcacaaacctgctgtaaaatatgaatcatttcatcaatatttctttcagccggcactttaatgtcaacaagagcctgcatggtaccacgagaatgattgctcacgtttgtgatgtttctgttggggatgtaatgcagtgttccgtcaaagctgcggatttgagttgtccttaagccaacctgctcgacaattccgtcaaaggtggaaacggtaatataatctccgacatccaattgtttctcaagcaaaataaaaaaacctgtcacgatatcactgacaagcccttgggcgccaaatccgacagccaggccgacgattcctgcccccgctaaaagagcgcttggatcataatgaaacaaatctagaaccatgacgaaaaatatgaaaatcaatgtataagcaaatatgttaagagtcaggcttcggagcgtatgtgcacgtccgatagacaagctattctgctcctcgaattttgcaaacagatgtttaatgattttcatgcctaatgatcgaacgataaaatagagcaatatcataatggcgagtttaatgagcagaacaccggcatttgtaatcagtcccgcccaatcatattgtttaataaagtccatgttgagctccttttctaattgattgctgcacattgagactagttaccctgtacatgaccatgttaaacgttttattcaaaaatgtcgaagccaaagacatacatgatttgttaaaaattgactcaggaaatctgcttttatataatggcattgcaatataactaaaaatggttaatcaccctttattttcatgcgattttgacctttaagccaaacaataaattggagggatacatatggcagaacgtatggtaggtaaacaagctcctcgttttgaaatggaagcagtccttgcaagcaaagaattcggcaaagtaagtcttgaggaaaacatgaaaaacgacaaatggacagtgctgttcttctatccaatggatttcacttttgtttgtccgacagaaattacagcaatgtctgaccgctatgacgagttcgaagatcttgatgcagaagtcatcggggtttcaactgataccatccatactcatttagcttggatcaatacagaccgcaaagaaaacggtcttggccagctgaaatacccgcttgctgctgatacaaaccatgaggtatcccgggaatatggcgttttaatcgaagaagaaggtgtggctttgcgcggattgtttattattaatcctgaaggggagcttcaatatcaaactgttttccataacaatattgggcgtgatgttgatgaaacgcttcgtgttctccaggcgctgcaaactggcggactctgtccggctaactggaaaccaggccaaaaaacactttaattctttccaagaacgaaaagcggtctagcatattcgttaggccactctgttaaataggagggaaaaagcaatgaaattacgtcagtccatgccggaattgacgggagaaaaagcttggttaaatggtgaagtgacgagagagcaattgattggggaaaagccgacgcttattcatttctggtccatcagctgccacttgtgcaaagaagcgatgccgcaagtgaatgaatttcgtgataaatatcaagatcagctgaatgttgtagctgtacacatgccccgttccgaagatgatcttgaccttggtaaaattaaagaaacagctgctgaacacgatatcactcagccgatttttgttgacagtgaccatgctttaaccgatgcatttgaaaatgaatatgtacctgcatattatgtgtttgataaaacaggacagctccgtcacttccaagccggcgggagcggtatgaaaatgcttgaaaaacgtgtgaaccgcgttctggctgaaacggaataggtatctgactaaatagtatttcctaaaaacctgatcacatcaggttttttatttgtgcaaaaagcaatggaagaagagtaagaagcttatttttccaaatttgggtataggaattgatggtttgtttgattgatacgctagaaaacacagctaatttttgatgtttttcctcaattttagataaatctcatatctcataactcgaaaattgtagatattacactaaatttctttaaagaagtaagtaaaatatatattttcaacattataccaaataaactagaaagccccttaatcccttgagaataaaggactcttttgaaaaataaaacattttcagaaaataaggaatttttcatagagtaaatataatagtaaaatgctaaaataatagttgataaaattacttttgtaatctaatatcttaattaaagatgttaattttgatagggggtacattgaggaatgtttaatgaaagagaagctttgcgcttgcggttagaacaattaaatgaagctgaagtgaaagtcattcgtgaatatcaaattgaacgtgataaaatatacgcaaaattaagagagctggacagaaatggaagcccttccgaaatcaaaaaggatttccgttctgaaaaaaaacctgactctctgccggttctcgctgagcttgcggctcaggaaatcagaagctatcagccgcaatcacagcagcagtctgttcagcctcagcttcaatctatttcctctcttcctgccggtataccagacggaacaacacgaagaagaagaggaacggcaagaccgggatcaaaagcagctaagctgcgtgaagctgctattaaaacattaaaacgccacaacgcggcgattaagagctcggagcttcaaaaagagattgaaaaagaaagcggtcttgaaatccctaatatgacaacgtttatgcaaagcttaattaaaatgtacccggaagtgaaaaagccatatcgcgggcagtacattttagagggtgaaatcgaatctgcagaatcagcaaatgaataaatataaagaaaaactgcttggcatcgctcaagcagtttttttattgaggttttttctgtgaaggtttgttttctttttcaagattaagcttatacacccacttttgataaggcttttcttcagcggctctgtttctcagctcttcgattgtatggctcttggcctggtctgatgattgggcgtgggcaagctgtttttggagcacatgtatctgtttggtgacatcttcaaggatggtctctacatgatatggctgcgcgtaggccgctggagcttcttcttccgttttttctttttgtttcgtgccgccatcaatatcggcaaaatgagaagcaatccaggcatcgctttcatcaagctgccgtttatacgatataatagtttcgtgaaataatttttctttcgttttttctatgtctagcagtctttctttcgtttctatgattcgatctttcatatgatcaacttctattttaatatgttttagctgatattctttttctaccatttgctcttttagacgcccgttttcggcttttatcaattcggcttgctgttttgcctgaagcagtgcattttgttcctgctcaatcgaggcttgaagttcgctgatccgtttatgaagatttttattttcttcttcgattttgactttcgcaatatgaagtttatgtttttcttcgatttcggctctgcgtttataggtttcagcagatagaagctcctgcaaaacaacgattttatcaagcagttcagctcttatttggtgcagggtttggctggtgtgggaggcatgtttttcttttgttgacatatgtgttaattcggcagacagctgctggagtttttctttcatatcggtattttctttgagcagtttgttatttttctgatgaaagtagcttgcttcaagttcagaaatcagcttatggcaccttgaaagctcggattttaaataaaggttctcctgagacacgtcgtggaaaaaaggacctgatcttttcattcgaaccatctccctcatgatgttaacactacaatatgcaaatactgaacagctattcctctttaataaacagacaagcagtagcgttgagcctttgcttttgctatgcttttaacgaaactagaggtgagatgatatgaagcatgtaaacgtactgctggcagggggagcctcgcggcgatttggagaaccgaaggcgtttgtcaaatggaagggcaggatgctttacgaatgcgctaaagaggcacttggagaacaaacggttatcatcagccgtcccgaatttattgatagatttcaagaaaacggtgaaaatgaagtgtatcaagatgctgagccatttcaaggcatggggccattggctggtatatataccgcttttaaaaagacagacggtgatctttatactgttctttcctgtgacacaccgctgatacaaagaaggacgatactggagctcaaacgtctgatgactgccggttcggacgcggtagtcccaatttcagacggacaagtgcagccattgattgcgatttaccacaaacgtatcatgccagttctatacgatcagctttctgagaagaggttgagaatatcagatttattaggcagaatttcggtttgttacgtacaggctgaaaatatcggagcaaacccggcagagtttatcaacattaatacacgtgatgattttagctgtttggaagaaaaatcgaactccctcaagcgggactgacggggcaataacatgataagatgacataaaagataaggagaacaggtttgatggaggaacgttattcacggcaaatcagatttaagcaaattggggaagagggtcagaaaagactggcagacagccatgtgctgattgtcggagcgggagcgctcggcactgcaggagctgaagggctttcgagagcgggagtcggtacgattaccattattgaccgtgactatgtggagtggagcaatcttcaaaggcagcagctttatacagaaagcgatgccaaactccgcatgccgaaagccatggctgccaaagagcatctatcagcgattaacagcgagatacatattgaggcgtatgttaccgaaggaacagccgaaacgcttgagccgctgattgaaaaagcagatgtcgtgatcgacgcgacagataattttgaaacccgcatgctgataaacgatcttgcccagaaaacaaagacaccttgggtctatggcgcctgtgtaagcagccagggaatgttcatgactgtcattcccggagaaaccccttgtctgtcttgtttgtttgagcaaattcctgtcggcggggcgacgtgtgatactgccggcattattccgcctgctgtgcatatcgtttcagcatatcagcaggctgaggcatttaagctgttaaccggccaaatagaagcaatacagcggggttttgtgacatttgatgtctggaacaattcgcatatgaagattaacgttaatcatgtacgccgtgaggattgcccatcttgcggagcaaatgcggtatatccttatcttcaggattggaatacaccaaaagctgctgtattatgcggccgtgatacagtgcaggtaaggtcagaatcattaaaaagaatcccgaaacaggaactcattaagcggctgaaaacaatcggcaaggtcgaggctaatgcgtttttgctgcatattttttacgaggatttcagaattgtcattttcaatgacggacgggcactggtgcatggaacaaatgatgtgaaagaagccaactccgtgttggcaagagtgattggactgtaacaacaggaggggtcagaatgctggagaaaagaacaccgataccggtagacgaggcagttcggcgtgtctgccattttcaaaaacaaggtgaaacagaatgggtggcgcttgaagacagccttcatcggtttttagccgaagatataactgcggatcaccacgtacctgcgtttgaccgttcgccatacgatggttttgctgtcagagcgtgcgatacggcagaagcttcacgtgaaaacccagttcggtttgaagttattgaccatattggagcaggagcagtatctgaaaaagaacttggcccgtttcaggccgtgcggattatgactggcgcgcaaatccctgaaggggcagatgcagtcgtcatgattgaactgactcaaacctttgaggagaatgggaagtcatttatgtctttaaaacgccgctttcagacgggggataatatttcaaaaacaggtgaggacgctcaaaaagggagtgttttactgacaaagggcacccgggtgacaccaggagtgacggctcttttggcaacattcggatacgcatctgtgcctgtcgtgagaaagcctgtagtcgggattatcgcaaccggtaccgaattgctgaatgtcagtgatccgctggaaccgggaaaaatccgcaacagcaatgcgagtatggtatatgcgcaagcgatagaagcaggcgcaacaccgctttatttagggaaaatctctgatgaattggataaaagctttgctgcagttaaagaagcgatgaaaaaggtggacttcctgatcacaactggaggtgtgtcagtcggtgactttgactttttgcctgcgatctatgaaaaactcggagcggacgtgctgtttaataaagttgccatgcgcccgggcagcgtgacaacggtggcgcatgcaaacgatatgctgctgtttggcctttcaggtaatccgtcggcatgctatgtcggttttgaactgtttgtcaaaccgataatccagacatggttgctcaatgaaacaccgcattcgatttgtgcggaagctgttttgaccaaggattttccgaagccgaacccatttacccgatttgttcgtgcgctcgtgcaccatcaggaagggaagctgttggcgacacccgttggcttagataagtcgagctctgtcacatcacttgcagatgccaatgcatttattatcctgccgggcggcacgcgaggctacgaatctggcagaacggttcaagtgctgctcatcagagaagagaatggaagtgaatggccttggtccgtcctttcccgatcgtccaagttgtaggatttcaaaacagcgggaaaacaacgtttattgagcgcattcttgaaaaagcctctgaacaaggagtctgtttgggctgcctgaagcatcatggtcacggcggtgaaccgcaagcgctcacggaaggaaaagacacggaccgttacaaggcggcaggtgctgatgtaacagcggtagaaggtgctggtgtgttacagctgactgcccgccgcaattgggatttggcacggctgatcgagttataccaatttctcgaaacagactgtcttctgattgaaggctttaaaaaagccccttatcctaaagtggtaattctaagtgaaaaggaagatctggaagcgctgcaagcagtaaatataatcgccatcatctatagaaaaaaagagcatatgacagagcatcagggattacccgtttttcatgcggatgatccggttgccgtggattttgtgctttcacagctgaagggggaatctgcataatggaacggtttgagattacgaaaacacccattaatactgaagacatcattaaaaaagtggagaaacgggaagcaggagccattacgacatttattggtacggttcgggaatggacaaacggaaaaagaacggttcggcttgaatatgaggcatatgaaccgatggccgtgcaaatgcttgctcaaatcggcgctgaaatcgaagaaaaatgggaaggtgcctcagctgcgatcacgcaccgtataggtgtgctcgatatcggtgaagcagcggtagtgattgctgtatcttctccccatcgaaaagccgcatatgaagccaatgagtatgcgattgaacgcattaaacagattgtgccgatttggaaaaaagaaatttgggaagacggtgagcaatggatcggcgaccagctagaaacaacagcttatccgaacggaaaaccagatctaagcgagggagaccagcatgattaaaattcttttatttgcaggactggctgaacaggccggtacacaagcaatagaaatagatgtggaacaagcaaccacagatgaaataaaagcgagtctaaaagaacaatacggtcttgaatctattgatacgtctatgattgccgttaacgaaagctatgtaaaagaaaatacctctgtatcttcgggtgacacggtagccgtcataccgccggtcagcgggggatgaaaaccggacggcatttcagccgtccggtttttctgtatttcattggcatatccccaagtatcctcagcatacaatgattttctgtaagcgtttattctacatatgttactccctataaagtaagagactcactccataattagactgaaattttgaaaaataatagaaatttatttcgggtatcgatatagtgaagatgataaatgttggaaaggtgctggatatggagacatttaaaagattaaaaatgtattattggccgtacagaaaagtgtttatgtggtcgcttctagccatgcttttgatgactgcaattactgtcgtttatccgattatcctgcaaattacgattgatgagatcgtgctgggacggcagtatcagcttgcggcgtgggtcagcttaggatttattgcggtaatggttttgaaaggaatggctaccttttttcatcagtatttaggtgatatgttcgggatcaaatccgtttatcggctgagaaatggtctgtatgaaaaactgcagcggctttctttttcttactatgataacgcgaaaacaggagatttgatgtccaggctgactgctgatgttgaagggcttcgttttttcttatcatacggtctcgctgagctcattcgcttcggcctgctggtagccatcagcctgtcggttatgttttactattctgttcctctcacgcttgtgacaatagctgttctgccatttctcgcggttgcggtataccggtttgacaaaagagtccatcccgccttcagaggcatccgcaaatcgtttgcgaaactcaatacaaaagttcaggaaaatatcagcggcattaatacggttaaatctctttccagggaagattttcagatcagcactttcaataaagccaatgcagaatacagggcgcagtatttacaaacatcatccatctggtctgcgtatttccctttaatggagttcattggtaacatttgtattgtagctcttctctcatacggcggttacttggttatgcaaaatcagctcaatcccggcgagcttgttgctttcttcagccttgtcaattatatgatgtggcccattatgaacttaggttttgtcatcaatatgttctctcaagcaaaagcgtcaggggaacgcctgctcgacattctggaaaaagaagaagacattacaggtcatcctcatgctttgcataaacaaaaattaaccggagatgtccatttcaaaaatgtttctcttgcatacggaaaagaacaaacaaacgcgctgtgcaatgtaagctttgaggcaaacagcgggaaggtaatcggactgttgggcccgacaggttcaggcaaaagctcagtgacacagcttctcaccagattttacagtcctgttagcggaatgattaccattgatcacaaaccaatcacagattattcgttaaaaacccttcgctccaatatcggggtcgtacttcaagaatccttcctgttttcatctacgattagatcaaatatttcgtatgggcggccggatgcctcaatggaagacgtcattgaagcggcaaaaagggcgcaggctcataactttattatggagcttcctgataggtatgacaccatgctgggagagaggggaatggggctttccggcggacagaaacagcgtattgccattgcgagagccatctgcttgaacccgagcattttaatattggatgatgccacaagcgcagtagatatgcaaacggagcacagcatacagcttgccttaaaagaagtcatgaaaaaccgcacaacctttatcgtcgctcaccgcatttcttcactgaaacacgctgatgaaattctcgtttttaataaaggacgcattcgtgaaaggggaacacatcatgagcttcttgaaaaaggcggctactataaaaagatttacgatttgcaataccgtgatgtcaaaatgattaatgagccgcatgaggtcggatagggaggggccaaatgaaacaagcgaaaaaacaggggattttagagcgtttctattactcttcagatgaaatcattgaaaagccgtttaactgggctcaaatgtggcggctgctgagctatgtcaaaccatatcgaaaaacaattttgccgctttcttttctcaccgtattaattggcactgctgtgaagcttgtgatccccattttgatcggcgtttatgttcttgatcaagcgattacaaggagaaactcggagctgctgattcagctcatttttattattagcggtttatatgtcctcaattacgccgccaatgtgttaagaattaggtggatgaatcagcttggccagcatgtcatttacgatttgcgacagcatttatttacccatgtgcagcgcttatcccatcgattttttgatcagcggtcggcgggatcgatcttagtcaggatcatgaatgatattaactctcttcaggagctctttacaagcggagtcatcaatttgttgaccgacttgctgcttctggccggcgtgattattattttgtttacgctgagccctgagctgactatagccatcatggtgacattgccgattatgttttttatttcaacaagtctcagaaaaaaaatacgccgatcctggcaaacggtacggctgaagcaatcgaagctcaactctcatctaaacgaaagcattcagggcatccgggtcacacaggcatttacgcaggaagaagaaaacatggcgtattttgacggtgtcaatcaggagaactacgaatcatggcgggaagcaactagaaaaaatgccatgttccgtccgcttgtagaaatgacgaatgcgattgggacggctgtcttgatttggtatggagccacactcatcatgaatgaaaccattacgattggcgtcttcgtttcttttgctttctatctgggaatgttttgggaacctatttcgagactgggtcaggtctataatcagctgttaatggggatggcatcatcagaacggatttttgagtttctggacgaacagccaaatgtcaaggagaagccgaatgccattcataatgaaaagataaatggggagatcagttttgaagaggttgaattttcgtatgatgaaaaacgaaaagccctttacgccgtttctttctctattccggcgggctcgacgcttgcgcttgtcgggcatacagggagcgggaagacgacgattgccaatttaatcagccgtttttatgatgcgaccggaggcaccattaaaatagacggtataccgattaaggatctttcccttgccagtctgcgctctcaaatcagcattgtcctgcaagatacatttattttctctgggaccatcatggaaaatattcgttttggaaggccaaatgcttcggatgaagaggtgatgaaagcgtcccaagcggtcggagcggatgagtttatttctgatttagcagaaggatacgcaacagaggtggaggaaagaggcagcgtactgtctgccggtcagcgtcagcttatttcctttgcaagagcattgctcgccgatccggctattatcatccttgacgaagcaacggcaagcattgatacagagacagaagtaaaaattcagcaagcgttaaaaacgcttctgaaagggcgtacagcagtgatgatcgctcacagattgtctacgatccgcgacgccgaccgcatcattgttcttgatcacggcaggaaaatagaagaagggaaccatgatcagctgctcgctaaaggaggcatttatgccgggcttgtgaaagcgcaatacagcacagcgatagaataatatgaaaagccttcaatattgaaggcttttggaaatttattagaaaaacatgaaactttttgatatccttcccgtactatttgttagatattctcaaggaggttttgaaatggaaacgaatgtagaaaaaaacagcggaacggcgactgaaaagccttcacttttaggagtaatcacaagtccgtccgttcaatttgaaagaataagagaaaggccggctgtatggggaccgcttttgattgttgcagcaattatcatcgtcggtgccgtgctgcaatcactcggtacggattatagtgagcttttgaaaagccaggatacgcaagggctatctgctgaacaaatggaaactgtcgcaacaataaccaaagttggcggaatggcaggcgctattatcggcggtatcgcagcattatttattgcccctcttatttattggctctgtgtaaaagtatcaggcggtgttacgacatataaaaaaatgctttctctcggtctgtttgtctctttgattagcagtctcggattattggttaatggaatcgttgcttttacgactgacgtgaatcctctttacagcacgacgtcactggcagggattatcccatctgacggggctcttgccagcgtgttaaatacctttgaaattttcagcatctggagctttgtattattagcaatcggacttcacaaaacgggaggcatctcaaaaaaagccgggtggatttcagcaatcattctattcggaattttagttgtattttcgcttttttcaggtttaatcaattctgtggcgggtgcataagctcatgaaaaaagtctggatcggaattggaatcgcagttatagtcgctctttttgttggaatcaatatataccggtctgccgctccgacaagcggcagcgccggcaaggagatacagacggggagcgttgaagaaaatgaaatctcatcaacggttatggttcctggcacgctaaaattttcaaatgaacagtatgtcttttatgaagcggataaagggacattagaagacattaaagtaaaggaaggcgataaagttaaaaagggcacggctttagtcacctatacaaatgagcagctgagcctggaaaaagaacagaaccagttaacgtctgaatccaaccggcttcaaattgaccaaattcaagaaaagttaaaagccttggacagcaaagaaagagaactggaaaaacaggtaggaaagaaagaagcagaaaaacaaatcgaatctgaacggacagagcttcaaatgcagaaaaaaacagcggagatcgaattaaaacaaaccgagcttcagcggcagtcacttgccaaccgggtgtcagatttagaagtgaaaagcgaaattgaaggcaccgttatttctgtcaaccaagaagcggcatccaaaaagtcagatattcaagagcctgtcatacatatcggcaacccaaaagaccttgtcgtctcagggaaattgtctgaatacgatacattgaaagtcaaaaaaggccagaaggtcacactcacttcagatgtaatacagggtaaaacatggaaaggcacggtttccgcagtcgggcttgttccggatcagcaggagagcgctgcggcacaaggaacagaacaggcggtccaatacccgcttcaagtgaaaataaaaggaaatcttccagaaggaaagccaggctttaaatttatcatgaatattgaaacagataaacggaaagcaaatacgcttccttcaaaggcagtcaaaaaagaagatgaccaatattatgtgtatacagtaaaagacggaaaagcaaagcgagttgatgtcaaaatcggcgaagtgacagatgacctgacagaaattaaagaggggcttacccaagatgatcaagtcattttgaatccatctgatcaggtgactgacggaatggaagtgaaatcctaaatgattcagctttctaatgtgcgaaaaagctaccagatcggaaaggaaacgtttgatgttctccattctattgatttggacattcatcaaggtgaatatgtctcgattatggggccgtcaggatcaggaaaatcgacgatcatgaatattatcggctgtcttgatcggccgacttccggtacatatcaattggacggcgaagacatttcttcatataaagataaagaactggcggcagtccgtaaccggtccatcggttttgtatttcagcaatttcagcttcttccgcggctgaacgcaaaaaaaaatgtcgagctgccgatgatttattccgggataggcaaaaaggaacgtcaagagcgggctgagagagcattggaaaaggtcgggttagccgatcgaatgctccacatgcccaacgagctgtcgggcgggcagaagcagcgggtggcgattgcgagggcgatcgtgaatgagccgaaattgattttagctgatgaaccgaccggcgcgctggatacgaaaacaagcgaggcgattatggatcagtttacagcattaaatgccgagggaacgacaatcgttctggttactcacgagcctgaagtagcagattgcacgaatcggatcgtcatggtgcgtgacggaaacattgttcctgccagctccggacaaaggagtgtgggagaatgagcctgttggaaaacatcagaatggctctaagctctgtccttgcccataaaatgcgttcgatcttaacgatgctcggcattatcattggtgtaggctctgtcattgttgtcgttgcggtaggacagggcggcgagcaaatgctgaagcagtcgatcagcggcccgggaaatactgcggagctgtactatatgcctagcgacgaggagcttgcaagcaacccgaatgccgcagctgaatctacgtttacagaaaacgatattaaaggtttaaaaggaatagaaggcattaaacaagtcgttgcttcgacttctgaaagtatgaaagcgcgttatcacgaagaagaaaccgatgctacggttaacggaataaatgatggatacatgaatgtcaattctttgaaaatcgaaagcggcagaacctttaccgacaatgactttctcgcggggaatagagtcggaatcatctctcaaaaaatggctaaagagctgtttgataaaacctcccctctaggtgaagttgtctggattaacggacagcccgttgaaattatcggcgtgctgaaaaaagtaacaggcttgctttctttcgatttaagtgaaatgtatgtgccatttaatatgatgaaatcctcttttggcacaagtgatttcagtaacgtatcattgcaggtcgaatcagcagacgacataaaatcggctggaaaagaagcggcacagctggtaaatgacaatcatggcacagaggattcgtatcaagtgatgaacatggaggagattgcggccggaattggcaaggtaacggcaattatgacgacgattatcggctcaattgcaggtatttcccttttggtcggcggaatcggtgtcatgaatatcatgctcgtatcagtcacagaacggacacgggaaattggaatcagaaaatccctcggtgcgacgaggggacagattctgactcagtttttaattgagtcagtcgtattgacgctgattggcggtctggtcgggattggtattggatacggaggggccgcgcttgtttcagccattgcgggctggccgtcactcatatcctggcaggttgtatgcgggggcgtgctgttcagtatgctcattggtgttattttcggcatgcttcctgcaaataaagctgcaaagcttgatcccattgaagcgctgcgttatgagtagcctcatgcaacatgcatgaggtttttttatgtttagtgatttctactatgaatataaaagacttttttcattaaaataagaagaaaatgtcgtacaattgtccttatttttgtcgaatttacagtttacaaaccctatagacatacgttaatatggagaaacgtgaaagattttgatagttattgaatgaatttgaatgattttagttgcctaaaccgaaaatagcgtttacaatgaaattgtattcaaaatgaatacgttttcattaggaggtgaagcatgctaactcctgaacggcatcaattgattattgatcaaatagaaaagcatgatgtggtaaagattcaagagcttataaatctgactaatgcttctgaatcaacaatcagaagagatttatcgacccttgaagaacgcggttttttaaagcgcgttcatggtggagcggccaagctttctgatatcagacttgaacccgatatgcttgaaaaatcatccaaaaaccttcacgataaattgaagattgctgaaaaagcagcttctcttttagaagaaggggattgcatttaccttgatgcaggcacgacgacattgcacatgattgattttatggataaaaccaaagatattgtcgttgtcacaaacggggtaatgcatatcgatgcattaataaggaaagaaatttctttttatctgcttggaggatacgtaaagcacagaacgggcgcgattattggaggcgcttcattgattgccatggaccagtacagatttgacaagagttttctggggacaaacggtgtccatacagaggctggatttacaacgccggaccctgatgaggcccttttaaaacagaaagcgatcaaacaggcaaaacacgcttacgtcttagcagacccttcgaagttcggagaaatttcattttcggcattcgccggaataggcgacgcaacaatcattacgactgacgctgaagagcttacattcgataattaccaagaaaaaactgtcgtaaaggtagtgaaaccatgatttacactgtaacacttaatccatctgtcgattatatagttcacgttgaagatttttctgtaggaggcctgaaccgttcttcgtatgataccaagtatccagggggcaaaggcatcaacgtatcgagactgctgaaaagacaccatgtggcgtctaaagcgctcggattcgtcggcggatttaccggagaatatatcaaaacatttttacgggaagaaaacctggaaacagctttttctgaagtaaaaggggatacccgtatcaatgtaaagctgaaaacgggtgatgaaactgaaattaacgggcagggaccgacaatttcggatgaagatttcaaagcctttttagaacagttccaatctttgcaagagggagatatcgttgttcttgcaggaagcattccatcttcactccctcacgatacttatgaaaaaatcgcagaggcctgcaaacagcagaacgcacgagttgttctggatatctcaggcgaggctcttttgaaagcaacagaaatgaaaccatttttgatgaagccaaatcatcatgagcttggagaaatgttcggcacggccattacatctgttgaggaagccgttccttatgggaaaaagcttgtagaacaaggcgctgaacatgtaatcgtatcaatggccggagacggagcgcttctgtttacgaacgaagctgtttattttgctaacgtgccaaaggggaaattggtaaactcagtcggagcaggggattccgttgttgcaggtttccttgccggaatttccaaacagctgccgcttgaagaagcattccgcttaggagttacttcaggcagtgctaccgcgttctctgaagaacttggaacagaagaatttgtccagcagcttcttcctgaagttaaggtcacacgtctatagaggaggaaacacaagtgaaaataactgagcttttaacgaagcatacgataaagcttaatattgagagcaaagaaaaagaaaatgttattgacgaaatggtcactgttcttgataaggcaggaaagttaaatgaccgacaagcctataaagaagccattttaaatcgcgaaagccaaagctccacgggtatcggtgaaggaatcgctatcccccatgcgaaaacggcaagcgttatcaacccggcgatcgcgttcggacgttcaaaagacggcgtcgattatgaatcattagacggccagccggctcacttagtgttcatgatcgcggcgactgaaggcgcaaacaacactcaccttgaagcattgtcaagactttcaacgctgttaatgcgtgaagaaatccgtaagcagctccttgaagctgagtctgaagatgccatcatcgacattattaatcagcacgataaagatgatgacgaagaggaagaggaagaagaagcggcaccagcacctgccggaaaagggaaaattttagcggttactgcatgcccgacaggtattgcccatacattcatggctgcggatgcccttaaagaaaaagcgaaagagcttggtgtggaaattaaggtcgaaacaaatgggtcaagcggcattaagcacaagctcactgcccaagaaatcgaagatgcacctgcaatcattgtcgcagcggacaagcaggttgaaatggaacgttttaaaggcaagcgcgtacttcaagttcctgtaacggcgggtatcagacgtccgcaagagcttatcgaaaaagcgatgaatcaagatgcgccgatttatcaaggcagcggcggcggttcagcagcttcaaacgatgatgaagaagcgaaaggcaagtctggaagcggtatcggaaacacgttttataagcacctgatgagcggtgtcagcaacatgcttccgttcgtagtcggcggcggtattctcgttgcgatttcattcttctggggaattcactctgctgatccgaatgatcctagctacaacacgtttgcagcagcattaaactttatcggcggcgacaatgcattaaaactgattgttgcagttctggccggtttcattgcgatgagtattgcagatcgtcctggttttgcgcctggtatggtcggcggatttatggctactcaagcgaatgctggattcttaggcggcttaattgccggattccttgccggttatgttgtgattttactgaaaaaagtatttacgtttatccctcagtcacttgatggattaaaacctgttttgatttacccgctgttcggtatttttatcactggcgtattaatgcaatttgtcgtcaatacacctgtagcggcatttatgaatttcttaacaaactggcttgaaagccttggtactggaaaccttgtgttaatgggtattatcttgggcggcatgatggcgatcgatatgggtggcccgcttaataaagcagcctttacgttcggtatcgccatgatcgatgcaggcaactatgcgcctcatgcagcaatcatggccggcggtatggttcctccgcttggtatcgcacttgcaacaaccattttcagaaacaaattcactcagcgtgaccgtgaagctggtattacatgctatttcatgggagctgctttcgtaacagagggagcgatcccatttgctgcggctgatccgcttcgcgtcataccagctgctgtagtcggtgcagctgttgccggcggattaactgaattcttccgagtaacgcttccggcgcctcatggaggagtattcgtagctttcattacaaaccatccgatgctttaccttttaagtatcgtgatcggtgctgtcgtgatggcaattatcctcggtatcgtcaaaaaacctgttacagaaaaataagaaaaaaagcgtccttggttcgaaaggacgctttttcttatccggccggcagggagcgcggttaagttatgtattttattcttttttatgataaagtaaaagaagagaaacaactgacatagcaattgtctaggaggaaacactttgaccgaggaaaaaaatacgaatactgagaaaacggcgaagaaaaaaaccaatacgtacctggaatggggtaaagcgattgtcatcgctgttctgctggctctcctgatccgtcactttttgtttgaaccgtatttagttgaaggttcatctatgtatcccacattacatgacggagaaaggctgtttgtgaataaaacagtcaactatatcggcgagctgaagcgcggagatatcgttattatcaacggtgaaacttctaaaatccattatgtaaaaagattgatcggaaagcctggagaaaccgttcaaatgaaggatgacacgctttatataaacggtaaaaaagtagccgagccttacttgtctaaaaacaagaaggaagcagaaaaacttggtgtcagtctgacaggagactttggaccggttaaggttccgaaaggcaaatactttgtcatgggagataaccggctgaattctatggacagccgaaacgggctgggactgatcgcggaagatcgaattgtcggcacatcgaagtttgtctttttcccgtttaacgaaatgcgtcaaacaaaataaaaacgccttgctggcctaggacagcaggcgtttttattttgaaaaagaagcgaccaatgcaatgcataaaaccgtgatgaacactgaaccgataatagctagcacactgaagaaaaggtgaacctgtttgttctcttttccgcgcttttctaaaagccgtttagaaaaaatgtgcgaaaatatgtaaataagggctatgcctatatataagccgatatctttggcggtaaagcctgttacggcaaggtaaaagcccgtaaaaaagatcagtaagcaatattcagtaagtgttaaaagcctcaacgtgttcctccatgagagtgtgtaattttccaggcggatgcattctctctctttaattgtaacacagctggctggtttgggtgtataagtgttttctctctgttttatcagggaatcatttctcttgccctgcattcatggtatacttttattgatgatagacatgatggaggataataaatgattgctgtaaataatgtaagcttgcggtttgcggatcgcaagttatttgaagatgttaatattaaatttaccccaggcaactgctatgggttaattggtgcaaacggtgccggtaaatcaacgtttctaaaggtgctgtcaggcgaaatcgagcctcagacaggcgacgtgcatatgagtcctggcgagcgtcttgccgtcttgaagcagaaccattttgagtacgaagagtatgaagtgctgaaagtggtcattatgggccacaaacgcctgtatgaagtcatgcaggagaaagacgctatttacatgaagcctgatttctcagatgaggatgggattcgtgctgctgagctagaaggtgaattcgcggaactgaacggttgggaagcggaaagtgaagctgcgatcctgttaaaaggccttggtatctcagaagatctgcacacaaaaaagatggcagacctcggcggttcggagaaggtaaaagttctcttggcacaggcattattcggcaagccggatgttctgctcctcgatgagccgacgaaccacttggaccttcaggcaatccagtggcttgaagagtttctgattaactttgaaaacacagttattgtcgtatcccatgaccgccacttcttaaataaagtatgtacgcacattgccgaccttgattttaacaaaattcaaatctatgtcggaaactatgatttctggtacgagtcaagccaactggcgttaaagctttctcaagaagcgaacaagaaaaaagaagagcagattaaacagcttcaagagtttgtcgctagattcagcgccaatgcgtctaaatctaagcaggctacatcaagaaagaaacttctcgaaaaaatcacgctggatgatattaaaccgtcttcccgccgctatccttatgttaacttcacgccggaacgggaaatcggaaatgatgttcttcgcgtggaaggcttaacaaaaacaatcgatggcgtaaaggtgcttgacaatgtcagctttattatgaatcgagaagataaaattgctttcactggccgaaacgaacttgctgttactacgctgtttaaaatcatttccggggaaatggaagctgacagcggaacgtttaaatggggtgttaccacatctcaagcgtattttccaaaagacaacagcgaatatttcgaaggcagtgatctggaccttgtagactggcttcgccaatattctccgcacgaccaaagtgagagctttttacgcggtttcttaggacgcatgctgttctctggagaagaagtccacaaaaaagcaaatgtactttctgggggagaaaaggtccgctgtatgctgtcgaaagcgatgctttctggcgccaatattttaattttggatgagccgactaaccatttagacctagagtccattacagcgctcaataacggcttaatcagctttaaaggcgctatgctgtttacttcccatgaccatcagtttgtgcagaccattgccaacagaattatagaaattacacctaacggcatcgtcgataagcaaatgagctatgacgagttccttgaaaatgctgatgtgcagaaaaaattgactgaactatacgccgaataaaaaagcagagatttttctctgctttttttgatacctaaatgtgaaaggagatcacaacatgaaatttttggttgtcggagcaggtggagtaggcgggtatattggcggacggctttcggagaaaggaaatgatgtgacatttctcgtgcgccaaaaacgagctgagcagcttaaagaaaccgggcttgtcatccatagtgaaaaagggaatgtatcatttcaacccaaactaatcagtgccggagaaacagggcaatttgatgtcgttatcattgcttctaaagcatactcgcttggtcaagtgttagaggatgtcaaaccacttatccatcaggaatctgtcattatccctttcttaaacgggtaccgccaatatgagcagctatttgcggcattttcaaaagaacaggtgctgggcggcctgtgttttatagaaagtgctttagacaacaaaggagaaattcatcatacgagcgcatcgcatcgttttgtatttggagaatggaacggcgagcgtacggagcggataagagcgcttgaagaggcattttcaggtgtgaaggctgaagtcatcattagcgggcatatcgagaaggacatttggaaaaagtatctctttattgcagcgcaagcggggatcacaacgttatttcaacgaccgcttggcccaatcctcgccacagaagccggacgtcacacggcccaaactcttattggggaaatttgcgctgttttacgaaaagaaggcgttccggctgatccggatcttgaggaagagagctttcgtacgatgaccaacatgtcttaccatatgaagtcctccatgcttcgggatatggaaaacggccaaacgactgaaggagaccacctgcatggatttttgcttgaaaaagcaaaacgtttatctctcgcagcaccagtattagaaaccgtttatgcgaatctgcaaatgtatgaagcagaaaaataaaaaaaggaggcggaaaagcctccttttatttacttaaaaagcccaatttccgtttctgaagataggctctcttttcccgtctgccgtaattccgtcaatattcatatccttagaaccgatcataaagtccacgtgtgtaatgctttcatttaggccttctttgacaagctcttcacgagacatctgctttccgccttcaatattaaaggcataggcgcttccgatcgccaaatgatttgacgcgttttcatcaaacagcgtgttatagaaaagaatgtttgattgtgatataggcgaatcgtaaggaacaagtgccacttcacctaaatagtgagaaccttcatctgtttccaccagttcttttaaaatatcctcacctttttcagctttaatgtcgactatacggccattttcaaacgtcagggtgaaattttcaataatatttccgccgtagcttaatggttttgtgcttgataccactccgtcaaccccgtctttttgcggcagcgtgaatacttcttctgtcggcatattggccataaactcatggccgctttcattcacgcttcccgcacctgcccaaacatgcttcctaggcagcttaattgttaaatcagttccttcagcttgataatgtaaggcagcgtaatgtctctcgttcaaatggtcaactttttcatgaagattttggtcatgattgatccacgcctgaaccgggttgtcttcatttacgcgtgtcgctttaaaaatttcttcccacagaaggtggatcgcttcctcctctgatttgccaggaaacaccttgtgagcccagcctgctgatgccgcacctacgacagtccagctgactttgtctgattgaatatattgtctgtatgtatgcaatgctttgcctgctgctttttggaatgccgcaatccgtttggaatctataccttttagcaagtctgggtttgacgacacaacagaaatgaaagcagctccatttttggcaagctcttctctgccttttgcttcccattcaggatattcttcaaatgctttaaacggcgcaagttcgtattttaatttggctacttcgtcatcctgccaattcacggtgacgttttttgcgcccttttcatatgcgtgttttacaattaaacggacaaaatcccgaacgtctgttgaagcatttacgactacatactggcctttttggacattaacgccgacttctaccgccagctgtgcatatgtatttaatttctgtgaaaatgaatccatgaatcattcctccaagcttttttctcatcatatcaaatatgatcctataaaggaaagaaggagcccaaagtgaaaaacccaaaacgacacgtcttgggtttttcaatattatggatgattcagttttacagtgccgcctgcaggcgaatggggcatatttgccaaagaaatgctcatgcctccaagaataattccgcttaaaatggctgcgatcgctactcttcttcctaaatctcttagcatctgtttcctccttaacgtttctccatttcccacaatatgaaggaagtgaggaaaaaagaagcaagaaatttgccgcgtgtgagaattttgcgggtaaagactatttaattgccttttgcagcttatcaatcacttctaaagaacggcctgtgccgattgctacagattcaagcgggttttgcgccacgtgtacaggcacgacaatctcttctgtgagccattctttaattccattaaggagcgcaccgccgcctgttaaaataacgccgcgatcaacaatatctccgctcaattcaggcggacagtcctcaagtgtcgctctgatggcttcaagaatatgcaggagggattcacgcattgcatcttgaatttcgttggattgaagcataatggtttttggaagacctgtcacgaggtcacgtccccgaatttccattgcctctggtatatgttcaatcagagcatggccaattttcatttttacctgctcagctgtgcgttcgccgatcagcaaattgtattttttacggacgaaagaaacgatatcctcatcaagctggtctccgccgatcctgatagaatggcaggaaacaacgccaccgaaggaaataatagcgacctctgtcgtccctccgccgatatctactaccacattggcaaccggctcatcaaccggtaaatccgctccgatggcggctgcaactggctcttcgattaaatgaacgtttttcgcgccgcaatttttcaccgcatcactgatggcgcggcgttctactgctgttgagcctgatggtgtgcaaacgactacgttcggttttctgaacgacatgccgatgctttttgcggcttttttcataatgtgctttagcaggtcagttgtcatatcatagtctgcgatcacgccatctttcatcggtctgacagcgacaatttttcccggtgttttaccgatcatgtttttcgcgtcagctccgattgcaagcactgcttttgtcgtcgtatcgactgcgacaacagatggttcatttaggataatccctttatttttgctgtaaacaagtatattagctgttcctaagtcaatcccgatttcagttgattgaaacatgttttcacccaatctctatcctaatttaatatgattctacatttaaagtttctcagaaatactgcgatttttgggggtgtgtgtcggtaaagaaatgtttttgtaaaaaatcaaggaactgtgtaatagaagtaatacatttttcggttttatggaaaaaatatcttgtaattcttatagaaagcgggaaactttttcaaagtttcattcgtctacgatatattgaggtacatccttaaaacattacatgagaaaagaaacatttaaaggaagaagggtttttatgaaatcaataggtgttgtgagaaaagtagatgaattaggccgcattgtcatgccgattgagttgagacgggcattggatattgccataaaagacagcattgagttttttgttgacggagataaaattatcttgaaaaagtacaaacctcatggcgtttgtttaatgactggagaaatcacttcagaaaataaagaatacggcaacggtaaaattacgctaagccctgagggtgcacagctgcttctcgaagaaattcaagccgctttaaaagaataaaattatgctaaaaaaggcggagcgatatcatctccgccttttttgcgtatcaatttttgattaccgccgcctaagataagacatcaagatatttggtaatgaatgatttgggatactttacatattttactcaattatttgtcgaagaatggtacaataagtagagaaacacaagcggcaggtggtcatatgagaaaatatcaagctcgtatcatttccatcattttggcaatgatttttataatgttttgggattatttattttattttataggcaaaaacccgattaattggcctgttgatattgtgtatactgcagtcacgctggtaagtgtctggatgttggcttattatattgatgagaaacagcagctggttaagaaaatgaaggataacgaatggaagtataaacagctttctgaagaaaaaaaccgcatcatggataatttgcaggaaatcgtatttcaaacgaatgcaaaaggtgaaattacatatttaaaccaagcgtgggcatctataaccgggttttcaatcagtgaatgtatgggaacaatgtataacgattacttcataaaagaaaagcacgtagccgaccacattaacacccaaatccaaaacaaagcgtcttctggcatgtttacggcaaaatacgtgacaaaaaacggcacgattttttggggagaagttcattataaactttactatgaccgggatgaccaatttacaggcagcctgggtacaatgtcagatatcactgagcggaaagaggctgaagatgagctcattgagattaatgaacggctggcgagggaatcccagaaactatcaatcacaagtgaacttgccgcaggtattgctcatgaggtcagaaaccctttaacatctgtcagcggtttcctccagattatgaaaacacaatatccggacagaaaagactattttgacatcatcttttcagagattaaaagaatcgatttagtgctcagcgagctgctgctgcttgcaaaaccgcaggcaatcacatttaaaacacaccagcttaatgagatcttgaaacaagtcacgacattgcttgataccaatgcaattctgtccaatatcgtcatagagaaaaatttcaaagagacagatggctgtatgattaatggagacgaaaatcagctgaagcaggtctttatcaacatcattaaaaacggaattgaggcaatgccaaagggcggtgtcgtcaccatttcaactgctaaaacctcctctcatgcagtgataagcgtaaaggatgaaggaaacggcatgccgcaggaaaagctgaagcagattggcaaacctttttattcaacaaaagaaaagggcactggactgggacttcccatttgtttgagaatcctgaaggaacatgacggggaattgaaaatcgaaagtgaagctggaaaaggcagcgtctttcaagtggttttgcctttaaaatcagacagctgagaggagaaaaataaagtgaactcgcttctgtttgtatatgggacattaagaaagcatgaaaaaaaccatcatttgctggcacaatcggcatgtatcaatgagcaggcgagaacaaagggaagtttgtttgctgcaaaagaggggcccacagttgttttcaatgatgaagatgaaggctatatatatggcgaagtatatgaagcagatgaattgtgtatacataagctcgatcaattttttcaaggatatcataaacaaacggtgtttgtagaaacggatgtcgggattaaaattgcgcttatttattttatgaacaaagacgggtgtgccggttttacgaaaataagcagcggcgactggaaagaacatcagatgatcagcaaatcgaaaaatcccatttattattttgcctatggatcatgcatggataatgcccgctttcaaaaagcgggagtcgatcactattttcaagatccagtaggaagagctgttttaaaaggatacacaacccgcttcacgctaaaaagggaagacggttcaagagcggacatgttggaagacggaggaacaacagaaggcgttttataccgtatcccttattctgctctctcctatctatataaaagggagggcgtcgaatctcttacgtatcggccggcatttgtagacgttgaagctggcggaaggcactacaaagactgtttaacctttctcgtcctccaaaaagaagcggaaattgccccgcctcagcactatcagattgaaatcgaacgcggagcggagctgtatttgtcgcctgagtttactgaaaagctcaagcggcatatgaattcgctgccaaaaggataacactgtaacaaaagaatatgataaaatttgatcaatatcatgtcatataaaggagcactacgatgaaaaaagaatttgcggtaattgggctgggccgttttggtggcagtatttgcaaagcattaagcgaagaaggcgtcgaggttatggcaatggatatcgatgaagataaagtcaacgagtatgccaagattgcatctcacgcagttatcggtgattcgacagacgaatctgtcctgaaaaatttaggcctgcgaaattttgaccacgttattgtagcaatcggggaaaatattcaagcgagtattttaacgacactcattctgaaagaacttggcgtccatacgattacagttaaagcgcagaacgattatcacgaaaaagtgctgtctaaaattggtgcggatcacatcgtccacccggaacgcgatatggcaaaacgaattgcgcataatatcgtgtccaacaatgtacttgactatttggagctgtctgaagagcatagtcttgttgaaatcgtagctaacagccgcctggctggaaatacacttctcgatttagatattcgcgcaaaatacggtattaatatcgtagccataaaaaggggcaaggaagttatcgtatcaccgcttgcaaccgaagtcatccaccaagaagatatactcattgttattggatcagttacagacatctcccgtttcgaaaaaagagttcttcatacaaaatagcagccaaataagccgtcctcaaagggcggtttttcatattatcagaatataacaactttaatgaactgagcgtcaatttcttaaaatttcattgactaagcacaggcgttccgatagcatattgtaccatataataaaaaagaggaggggcctatttgaataaagaagcgctagtcaataggctgaatgcttcagccaaaagacaaaaagctgatatcgtcattaggaacggaaaaatcatggacgtttataatcaagaatggatatatgaagatattgcgattacagatggagttattgtaggcctcggtgagtatgaaggtgaaaataccattgatgcagagggacaaatgattgttccgggttttattgatggacatgtacatattgagtcgtcaatggttacaccgattgagttcgctaaagcagtgttgcctcatggtgtgacgacggttgttacagatccgcatgagatcgcgaatgtgtctggtgaaaaagggattgtgtttatgcttgaacaagctcggcatacaccgctgaatatccattttatgcttccttccagtgtgcctgccgcaagttttgagcgatcaggcgcaattctcaaagctgccgatctcaagcctttttatgaagaagaagaagtattagggctggctgaagttatggattatgtgtcggttcagcaggctgaagaagacatggttcagaaactgctcgatgcccgtgtggcaggaaaacggatagacggtcatttagctggtttatcaacagacctcattaacatttacagaaccgcctttgtcttaaacgaccatgaagtaacatcgaaggaagaagcccttgatcgtatcagaagaggcatgtatgtcatgatgcgtgaaggatcagtcgccaaaaacacgctcaatgtgctgccggcggtgaatgaaaagaacgcacgccggttctttttctgtacggatgataagcatgtggatgatttattgtcagagggaagtgtaaaccatcaggtgaaaatggcgattcaagctggacttgatccgtttttagcctatcaattaggaagcctcaatgcggccgaatgctacggattagatacaaagggagcgattgccccgggttttgacgctgatttgctctttgtatctgatctggaaaatgtcactgtcacaatgacgatggtaaaagggcagactgttgctgaagacagcaaagcggtttatcaggatcatgcttcaactgcagcaccagatcaggcactgcttgattctgttaagcttgctgctcctcttaacaaacaggattttcatatgccaatcgattcagaggagcagatcaatgtcattcaaatcataccaaatcagcttgaaacacgattagtacaagttccggctcctgatgcccgcgaatttgagcctgacactgagtttgatttgttaaagattgcagttgtcgagcggcataaaggattaaaagaaaccggacttggtattgtgaaaggttttggattcaagagcggagcgattgccacaaccatttcacacgactcccataatattattgctgtcggaacgaatgatgaggatatcgcggcggcagttaataagctgcaggaaattggcggaggattaacgattataaaaaatggggaagagctccattcagtaccgctgccgattgcagggttattatccgaccaatctgcagagcaagtgaatcaaagcttgctgacgcttcatgataaattgccgttaatcggtttcacaggcggatttaatccatttttgacattgtcgtttttagcgttgcctgtcattcctgatattaaaatgacgactacgggattattcgatgtaaaatcatttcaacacatatcactgcaataaaaagaggcactccctaagggagtgcctctttttttaaacctccataatgatcggcaggatcattggacggcgctttgttttttcgtacaagaaaggtgcaagcgtgtctgtaatctcatttttgatttcagaccattgagtcgtttttcgttccattactttttgtaagtgatttgaaatgagctcttgagcgtcgttgatcaagtcgccagattctctcatgtacacaaatcctctggaaatcaaatctggacccgctgaaatcttgaagtcgtccatgtcaatgctgacaacaacgatgacaagtccttcttcagagagaattctgcgatcacgaagtacgatattgccaatatcaccgataccgcttccgtcaatgtacactgaaccggacgggatttttcctgcaactgaagcctcatcgcctttaagcgctaatacttcaccattatccatgataaagcagttttcctctgggatgccacaatctgttgcaagcttgacatgcatcttttgcattctgtactcaccgtgaatcggcatgaagaatttaggcttgattaaacgaagcatcagcttctgttcttcctgtccgccgtgaccggatgtatggatatcgttaagagggccgtgaataacctcagcacccgcacgatacagctggttgattgttcgactcacgctgattgtgttgcctgggataggggatgaagaaaatacgaccgtatccccaggattgattgaaatttggcggtgtgtgccgtttgcaattcttgataacgccgccattggttccccttggcttcctgtacataaaattgttactttattagcaggcatacgattgatttcgttatgctcaataaacgtatttttaggacagttaatataaccgagtgtctgtccaatttcgatagccgattccatactgcgtccaaatacggcaacttttcttccattttgtacagcagcttcaattacctgctgcaagcggtgaatattcgacgcaaatgtagcgaagataattcggccgtccaccttgcggaaaatgtcatgaatgctttctcctacacgacgctcagacatggtaaactccggattttcactgtttgtgctgtctgaaagaaggcacaaaacgccttctttaccgatttcggccattttcgttaagtttgccggctcgccgactggagtaaagtcgaatttgaaatccccagtatgtacaatgtttccgggcggcgtttttacaacaatgccgtaggaatccggaatactgtgtgttgttctgaagaatgacacagccgttttgcggaactttacaatatcatcctcgccgataatgttcagtttcgtctgtctcaataatccatgctcttcaagtttattccgaagtaagccgatcgcgagttttccgccgtatacaggaatattcacttgtctgagcaggtatggaataccgccgatgtggtcttcgtgcccgtgggtgataaaaagccctttaattttatcttcgtttttgactaaatacgtataatcagggatgacgtagtcaattccgagcagttcgtcctcgggaaacttgatccccgcatcaatcagtacaatttcatcctggaattgcaccgcgtacgtatttttaccgatttcgcccaaacctccgagggcgaaaacagcagtctgatcattttttacaaatttcataccgctcataactccaatactttaaaattttcgctctgttgttcatattctaagaatgcaccatcaacaggtgtaataaactcaatattaaatttcttttctttcagctttgttctgacgtcacgctcagatacgccttcaatataaagtgaatctgtcttttcccgaacaggtacttcgtcagccttctcttgataaaataccttataaatcattccaaatctctccttaaatgccgtatgttagactcgctcattctattatattcgaaaacggaatataaggaaagccttgagcaaaataaggatctctcaaatagtgaaagatcccttgtcaggcaattgctttcttacggagcattccgttccattgtcttctgagtttctttcttaatttacgcagcattagccagtccctcctttaatgaaaaatttgtcccagagttcttttatacaaatagtatacggagattgaggaagacttttcgtggttattaatggaatttaatatgatttttgaacgaaattgtttgctgaatgacaatctttttgtatgatgagggtgggaattgcagaccaagacgataaaggggaagttgcgatggattctaaattaatcttttttgatattgacggcacaatatatgatcatgataagaatataccggaaagtacgagaaaaaccgtggcggagcttcagcgccaagggcatcatgtgtttattgccagcggccggtctccatttttggttaagccgattttggaggagctgggcatccactcatttatttcctacaatggacagtttgttgtctttgaaaatcaagtgatttataaaaatccgctgcctgaaaatgcaatcaggcgattattaaagcaggcggatgaaggcaagcatcctgttgtgtttatggctgaggacacgatgaaagcgactgttgcggatcacccccatgttctcgagggaatcggcagccttaaaacagattatccagagaccgatgaccttttttatgaaggaaaagaaatttttcagcttcttttattttgtcaggatgaagaagaaaaagcttatgccgcttttcctgagtttgatctagttcgctggcatgagctatcgactgatgttctgccgcacggaggttcgaaggcagaaggaatcaaaaaagtgattgagcgtcttccgtttgatatcggcgatacatatgctttcggcgacggattaaatgatttgcaaatgattgaatacgttgggacaggcgttgctatgggaaatgctgttcccgaactgaaagaaatcgcggactttgtaacaaaaccggtggacgaggatggaattgcatacgctgtcaaagaattgggccttttaaaataaagaaacggctggcattgtgccagccgttttctcttttagcgctcaattgcgattgcattttcaggttctttgaaaggattttccttatcaatatgatcatagaacataacgccgttcaaatgatcgatctcatgctgaaacacaatagccggaaatccttttaaacgaatatcaatattttcgccttctagtgttgttccttttactctgatgcgagcatagcggggaacataaccgggaatcgcttcatccacagagaggcagccctcgccgcttgttaagtagcttttttcaactgaatggctgacgatcttaggattaaacagagcatagctgtataatttaccggaagcatcttccgcatgaacggcgatcattcgttttttgatattaatttgaggagctgcgagtcctacgccagggcgcagcttgtatttttcggctaattctggattttggctgtttttaacaaattcgatcatgtcggccagctgctgtttttctgcatcagttggaggcagctcaacaggttcggcagtctctctgagggctggatggccgtcacgtacgatgttttccatagtaatcaagaaacttcactcctaaagcttaatatgtaaattatatcggatttcttcacaaaggtgcaacgaaacgaatgaccagccgtatatggctggtcaatttcatgctgtgtggttagcaacagcctccacctaaataagcagctccgacaatgattaacagaatgaataaaacaacgattagcgcaaaggtgcggccgtagccatatccgcagccaccatatccgtaaccaccataactgcagcagcctccgccgtaaccatatccatacatattacataacctcctcttttaattacgccagagcctttataagtaggcatagcgtctaatataacctatgtaaaaacaaaaaagttgtatggtcatctgtcctgatttttcacttttttgatttaatttcagtattgcatttatacagcacggctattgccaaatgtccccatggattctatagtagaaattgtcaagattgggggatttaacgtgaaagacgctataaaacggcggcctggaatgaagatcggagctttttgtgccatggcactgatattaacaggatgcatgggacaggacccggttgattcagttcatcattcattagaaaaagccgcggaatcggaaaagccgtttcaagaagaacaaaacacactcaaagaattagaggccaaagaaaatcagctttacgatagtgttatgaagctcaatatggatgattataaaaaaattgttgctttatctaataaggcgcttgaaaatgtcagcaaacgcgaagaacacctagagcttgaaaatgacagcatgaaaaaatcggaaacagaatttgaggaagcaaaaacgtcagcggaacatattaaggaaaaagacataaaagaaaaggccgatgccgcagcaaaccatatggagaaaagatatacatcatatggcactatgtataaagagtataaaaaagcgcttgagcttaataaaaaactgtatatgcagctgaaagacaaagatttgacaagagatgatctggatcagcagatcgataaagtcaatgcttcttatgaaaagatccttaaatatagcggagaatttaatgaacaaaccgaaaaatataataaagcccgggaagatttatatgatgctgcaggctatcgtgtgaaaaagagctgactcgatcagctctttttttgaatgaaatgcgattcggatttcgttcaaaattttcatttctattgtagtacagcatagtaaggtatactagtacagttttgggtgcggttggcatctgtttttttgatgaaaatgtaaagcgaatacatttattgaaaatcagcgatgaaaacgattgacggttcttctttatttggtgtaaactaatccatgttaagcggtgttgtattagttttttacaacttcgaaataatacagttcaaagcagagtgtaactatcctacataaaaggttttggcaaactggggatcggctaaaatataatacgacttactgctgatactttagggtaccctaagtttgtatgtataaaaggaatgcacgtctaatgactgtttaaaagaaaggaagaggtgacttagtatggctgcaaaaacgaaaaaagctatcgttgacagtaagaagcaatttgatgccattaaaaagcagttcgaaacgttccaaattttaaatgaaaagggagaagtcgtgaatgaagcggcgatgcctgatttaactgatgatcaattaaaagagctaatgcgccgcatggtatttacgcgtgtgcttgaccaacgctctatctcattaaaccgtcaaggacgtctcggattttacgctcctactgcgggtcaagaagcttctcagattgcaacgcatttcgcgcttgaaaaagaagactttgttcttcctggataccgtgatgtgcctcagttaatttggcacggccttccattatatcaagcgtttcttttctctcgcggacatttcagaggaaaccaaatgcctgatgatgtgaatgccctttctccacaaatcattatcggtgctcaatacattcaaacggccggtgttgcgctaggtcttaaaaaacgcggtaagaaagctgtcgcaatcacttacactggtgacggcggagcttctcaaggggacttctacgaaggaattaactttgccggagcttataaagcacctgcaatcttcgtggtacaaaacaaccgttacgcgatttcaactcctgttgaaaaacaatctgcagctgaaacaattgcacaaaaagctgtagctgccggtattgtcggcgtacaagtagacggaatggatccgcttgctgtatacgcagcaactgctgaagcacgcgagcgcgcaatcaacggcgaaggtccaacactaattgaaacacttacattccgttatggcccgcacacaatggctggtgacgatcctactaaatatcgtacaaaagaaatcgaaaatgagtgggaacaaaaagatccgcttgtacgcttccgtgcgttccttgaaaacaaaggcttatggtctgaagaagaagaagcaaaagtaattgaggatgcgaaagaagaaattaagcaagcgatcaaaaaagctgatgctgaaccgaagcaaaaagtaactgatttaatgaaaatcatgtacgaaaaaatgcctcacaaccttgaggagcaatttgaaatttatacacagaaggagtcgaagtaagccatggcgcaaatgacaatgattcaagcaatcacggatgcgttacgcacagaactgaaaaatgacgaaaatgtcttagttttcggagaagacgttggtgtaaacggcggcgtattccgtgcgacagaaggattgcaaaaagaattcggtgaagaccgtgtgtttgacacgccacttgctgaatctggtatcggcggtcttgcccttggtttaggcttaaacggcttccgtccggtaatggaaatccaattcttcggatttgtttatgaagtaatggattcagtttctggccaaatggctcgtatgcgctaccgttctggcggacgctggacttcacctgtaacaattcgttctccattcggcggcggtgttcatactcctgaacttcacgctgacagcttggaaggtcttgttgcacaacagcctggtatcaaagttgtgattccatcaactccttacgatgccaaaggacttttaatttctgcgatcagagacaatgatcctgttgtcttcttagagcatatgaagctttaccgttctttccgtcaggaagttcctgaagaagaatacacaattgagcttggaaaagctgacgtgaaacgtgaaggtactgatctttcaatcattacttacggcgcaatggttcatgaatcgttaaaagctgctgaggagcttgaaaaagacggcatttctgctgaagttgtcgaccttcgtacagtaagcccacttgatatcgatacaattatcgcttctgtagaaaaaacaggacgcgcgattgtcgttcaagaggcacaaaaacaagccggtattgctgcaaacgtagtagcagaaattaatgaccgtgcgatcctgagcttggaagcacctgtacttcgcgttgcagcgccagatacagtatttcctttctctcaagcggagagcgtatggcttccaaaccataaagacgttcttgaaacagcaagaaaagtgcttgaattttaatcaaactgcataatcgagagggaagatgaacgttttccctctattatatatctgttttcaatgcttacgatgtaaactttaaaattgcttaatcaaactaggaggtcgagaactgtggcatttgaatttaaacttccagatatcggggaaggtatccacgaaggcgaaatcgtaaaatggtttgtcaagcctaacgacgaggtagacgaagatgatgtactggctgaagtccaaaatgataaagcagtagtagaaattccttcacctgttaaaggaaaagtattagaattaaaagttgaagagggaacggttgcaactgttggacaaacgattattacgtttgatgcacctggttacgaagatcttcaatttaaaggcagcgacgagtctgacgatgcgaaaactgaagcacaagttcagtcaactgcagaagctggacaagacgttgcgaaagaagagcaagctcaagagcctgcaaaagctactggcgcaggacagcaggatcaagctgaagttgacccgaacaaacgcgtgatcgctatgccttccgtacgtaaatatgctcgtgaaaaaggcgtagacatccgtaaggttactggttcaggcaacaacggacgtgttgtaaaagaagatatcgacagctttgtaaacggaggagcgcaagaagctgcaccgcaagaaacagctgcaccacaagaaacagctgctaaaccggctgctgcaccagctccagagggcgaattcccagaaacacgcgaaaaaatgagcggtatccgtaaagcaattgcaaaagcgatggttaactctaaacacactgctcctcacgtaacgttaatggacgaagtggacgtaacaaaccttgttgcacatcgtaaacagttcaaacaggttgctgctgatcaaggaatcaagctgacttacttgccttacgttgtaaaagctcttacatctgcactgaaaaaattccctgttttaaacacgtccattgacgataaaacagatgaagtcatccaaaaacattacttcaacatcggtatcgctgctgacactgaaaaaggcttgcttgtaccggttgtgaaaaatgcagatcgtaaatctgtctttgaaatttctgatgagatcaatggccttgcaacaaaagctcgtgaaggcaagcttgctccagctgaaatgaaaggcgcatcttgcacaattacaaacatcggttctgccggcggacaatggttcactccggttatcaaccatccagaagttgcgattcttggtatcggacgcattgcagaaaaagcgattgttcgtgatggcgaaatcgtagcagctccagtcttagctctctctctcagcttcgaccaccgtatgatcgacggagcaactgcgcaaaatgcattaaatcacatcaagcgtttactgaacgatccacaattaattttaatggaggcgtaatgttatggtagtaggagatttccctattgaaacagatactcttgtaattggtgcgggacctggcggctatgtagctgccatccgcgctgcacagcttggacaaaaagtaacagtcgttgaaaaagcaactcttggaggcgtttgtctgaacgttggatgtatcccttcaaaagcgctgatcaatgcaggtcaccgttatgagaatgcaaaacattctgatgacatgggaatcactgctgagaatgtaacagttgatttcacaaaagttcaagaatggaaagcttctgttgtcaacaagcttactggcggtgtagcaggtcttcttaaaggcaacaaagtagatgttgtaaaaggtgaagcttactttgtagacagcaattcagttcgtgttatggatgagaactctgctcaaacatacacgttcaaaaacgcaatcattgctactggatctcgtcctatcgaattgccaaacttcaaatatagtgagcgtgtcctgaattcaactggcgctttggctcttaaagaaattcctaaaaagctcgttgttatcggcggcggatacatcggaactgaacttggaactgcgtatgctaacttcggtactgaacttgttattcttgaaggcggagatgaaattcttcctggcttcgaaaaacaaatgagttctctcgttacacgcagactgaagaaaaaaggcaacgttgaaatccatacaaacgcgatggctaaaggcgttgaagaaagaccagacggcgtaacagttactttcgaagtaaaaggcgaagaaaaaacggttgatgctgattacgtattgattacagtaggacgccgtccaaacactgatgagcttggtcttgagcaagtcggtatcgaaatgacggaccgcggtatcgtgaaaactgacaaacagtgccgcacaaacgtacctaacatttatgcaatcggtgatatcattgaaggaccgccgcttgctcataaagcatcttacgaaggtaaaatcgcagcagaagctatcgcaggagagcctgcagaaatcgattaccttggtattcctgcggttgttttctctgagcctgaacttgcatcagttggttacactgaagcacaggcgaaagaagaaggtcttgacattgttgctgctaaattcccatttgccgcaaacggccgcgcgctttctcttaacgaaacagacggcttcatgaagctgatcactcgtaaagaggacggtcttgtgatcggtgcacaaatcgccggagcaagtgcttctgatatgatttctgaattaagcttagcgattgaaggcggcatgactgctgaagatatcgcgatgacaattcacgctcacccaacattgggtgaaatcacaatggaagctgctgaagtggcaatcggaagtccgattcacatcgtaaaataattttcatatcaaaaacagccctcgctcaaagcggggctgtttttttattttgacagcacatgctgtaatggtttaatgatgtcttctttctttttcacacatccctcgattttcaccacgacatggcgctgatcaacaaccataagggtagggacagtttcaatctcatcttcccagccttcttttttatcatagaccttcattttatctatttgctcgggataatctttttctaaatcaagcagtgcatcgtaataaggcgcttcctggtctatttggttctcatcagaaaaaaacaggatttgtgtatgatgaatgttgtcaatccggctttttttcatcggattgatggtggaaagcgtacagcccgataaagcaaatactattatcagcatggggaataccgcgcgatatcgcatctatcttctcctctgtataaacagtagttaactagctttagtttatcacgagaggcggcttaatctgcttcttgttacctaattgttatataattgaaaccgtttttaaagtgagattacatattatatcaatcgtttaaaatagcaacctggggtatattgaattttttgctgcattcttggatgaaagttcaagaaaacgtgaaattacattatgtgctgtggcatatatatcgagtaaagcttctgtatgaagaagatattgtatgagggaaaatggaaaagcacggtctatatgatgatctaaaattaaatgtgttatacagtttattgttgacattttaaatgtgacatattaatataataacaacaaaagaaattaagcgttttcaaatttcaaagaaatggggaataagagatgggtacgattgtttgccaagattgcaacgaagccattcattactttgaagatgagaaagtgacaacattatacggaacatgctgcggacaatgtcaatgtcctgttgatgaagagtaaaaaaaagcatgcggctttaagccgcatgctttttattttttattgaattgctttttgttctttgatgacccggatcatatgtaaagtcgagtcctcaggtccttgaacagggaggcctgcgtcaaggtttttaaaaatgtagctgatgttttcttctgtaataatttctcctggaatgaagattggaataccaggcggatataccatgacaaattcagcaataatccgtccggatgcttcttttaatgggatgacttccgtatttgcataaaaagcatcacgcggagtcattgccaataaaggtatttctggaagcagaacctcagtttgctgatgtgttacatcttgttctgacatttgctgtgcgatctcagttaaagcctctacaagccggtctgcatcattttggctgtcaccaggagtgaaaatacacaaaatattgtacagatcagaaagctcaacctcaatattaaaggattcacgaagccatttttccacgtcatgtcctgtcaggccaagacttttcacagagataatcaattttgtcggatcatagctgtaagctgctttcgaaccaagaatctcagaaccgacacaataaatgccttcaatctggttgaggcgatctctcgtctgattggcaagcttgagtgtttcctcagcaagctggtggccttctgttgcaaggcgttttctggcaacatccaaagaagcgagaagcaagtaagaagttgacgtagttgtcagcatgctcaggatggattgcactctgtcttttgatacaaggccctctctcatgtttaaaatcgaactttgcgtcagtgatccgcccagcttgtgtacacttgtcgctgctatgtccgctcctgcctgcatagccgatagcggcaattcgtcgtgaaaatgaatgtgaacgccgtgtgcttcatccacaagcactggcacatcaaacgaatgagcgagttctacgatgctttttaagtcggctgcaacaccgaaatatgtcgggttgatgacgagaagcccttttgcatccgggtgctcggtaagcgcccgtttagcagattcaagtgtaattccgtgggagatgcccaattcattgtcaatttcaggatgaataaaaattggaaccgctccggaaaatacaatagctgtcataattgatttatgaacatttcttggaataataattttatcaccaggtccgcaaacagccattaccattgtcataatggcgccgcttgttccttgaacagaaaaaaatgtatgatccgctccaaatgcttcagcagccaggtcttgtgcttgtttaataatgccttttggcgcgtgcagatcgtctaatggttcaatattaatcaaatctatgcttaacgcgttttcaccgataaattgtctgaattctgggtccattcctgccccttttttatggccgggaatatggaattgaacaggctgtctgcttgcatgctttttcagtcctgtgtataagggtgtttcatgttgcgacaattgttttcccacctttgtaatcatacctatgcataatagtgtgtattaaaatcagtttctcaaccgttttttagacgtaaaacaaatgaattatattatgaacttgaaagaatgtaaagaacaatttatgatcaaatgaagatgctttctcttaagggaagtaaatctacaaggagtgaagaaaatggagtatcaatatccgatgaatgaagattggacaaccgaagaagcagtggatgtgattgcatttttccagcaggttgagcttgcatatgaaaaaggggcggatcgtgaagaactgcttaaagcttaccgccgtttcaaggaaattgtaccggggaaggccgaggaaaaaaagctatgcggcgagtttgaggaacaaagtacatattctccttatcgcacggtcaaacaggcgagagaatctgatcaggcgaagattaagatgtaggaaaaagagctgggggatatcccggctcttttttatgcttgtgatactttttgggtgagacggtacagaaaagcaagctgcttaaaggcatcgtcgatacgctgaaggaattcctggttattcatattcagcacttcttctttttggagctggatgccgcataacagctcggctttctttacagtctgcaaacgctcaaacagtgtcttcagctgttccttgtccatttcagactgtttatgtactcccggttttgtgtgatctgcagaccaaacgaagctgtcagggatatttttcgtaatggtttcttggttcatttcaagcaatttgccgtattcttctttgataggggattcataaataatcgcaaaccacacaaagacgtggctttcccataaaccaatttggaaatgcggcagttttttatagcctcttttgctgtttgcgaacgccacccagctgtcagccgggggattgacggatcttcttgcgtgctttgccacatgcgcaaacatttcatctccggttaaagctgataaagttggggcaaaatgttcgcctagagctgtaagcttcggacggaccgtctcttttaatacttccatgcgcgcgtctaagccttctattgtaaaagtgttaaagtcctcttcagtgaaacgcatttgtgtcatgattttcctccttcatgctaagtatacatattttatcacagttcatacgagcttcaaaaagattgagtgcgtttgaagtaaggggaaatgtggtaataaacgaataggtaaacacacaattttcagaatcatgttgcgcgtaaatagaacaatcatacgatataagaagtaatcattgttgaatggcaaaatgggatgcttttttacaaacaaatgatctctggaaggggcgaaagacaatgaggcaagttgtaaaagagggatttaaggaagagaaaaacaatcgtgttgctgtctggagactagaggttgattatgaattggcaaccctatatgaagcaatgcagaaagaaaatgaagagcagattgaacaaagcaaaaacaaacttgagcgacttagaaaagaatggattcgtcttaacgggtaaaaaagcgatagtgaaaacgaaccgcatgaatggttcgtttttacgtgagaagggatatttttcattttccttgctttttcattgccgttatcagtatcctataaaataaaaggtctacatagaagagaggtacgaacgaatgacaaattggacggaaattgatgagattgcaaagaagtggataagagaagcaggcgcgagaattacacaatccatgcatgaaagcctaacaattgaaacgaaatcaaatccgaatgatttagtcaccaatattgacaaagaaaccgaaaagtttttcattaatcgaattcaagaaacttttccgggacatcggatactcggtgaagaggggcaaggagacaaaatccactcacttgagggagtcgtatggattattgatccgattgatgggacgatgaattttgtgcaccagcaaagaaattttgcgatttccattgggatttttgaaaacggtgaagggaaaatcggtttaatttatgatgtggtgcacgatgagttgtatcacgcatttagcggcagaggagcttatatgaatgaaacgaagctggctccattaaaagaaaccgtcattgaagaagcgatacttgccattaatgcaacatgggtaacggaaaacagaagaattgatcaaagtgtgttagcgccactcgtgaaaagagtcagaggcacacgctcctacggttctgccgctttagagctggcaaatgtcgcggcaggaagaatagatgcttacatcacgatgcggcttgcgccatgggactacgcagccggctgtgtgctgctaaatgaagtaggaggcacctatacgaccattgaaggagagccgtttacctttttagaaaaccacagtgtgctagccggaaacccatctatacataaaacgatatttgaagagtatcttcatgctcggaagtaggccatttgagcaggatgatctcagcttgttagaaaagctcgcagaggctcaacctgtatggaaagaggaggagtttggagataaagatgcagaagactatatcatttcctactccatgtacaacggttcatggcttgtatgggaaaaagacggtatgcctgttgccgtcagctaccatctcgagtggtctccttcaaacggtaagccgtggctcggaacggtcctgattgacccggctgaagaaaaaaagggacatgcgaagatgatcattgaacagatcagcaaattgcttagagccaaacacaaagcgatgtttgcgggagttcccattgagcgcagtgaatggatactgtttttaagccaatgcggctttgaacagctgaaaacggaaaaagatgagaaaggcaaatcatttatgatcttggtgaagcctttagcagaagctgccgtatgataacgacagcttatttgctgcatgcgggttcaataaaaagcctctcaaacattgagaggcttctgatgatttgaaaattatttttttactgcatgaatataatgaatcgtttcaaacgctgacaaattgtcttttcgattactaaagaaaaggtcattgatgtcgtctggtgatagatgttcatagatcagtaaaccagatgactctaacagatgttcaatctcttgataagtgaaacatgatttcatcggttccccgcttgcggcagccatcttcaccatatgttcaactcgatttgacgtcccttttgctgtaaaaagtgtttcgtccgcataatcaaaaacaatagagcttccaggcgggacataagaaaataaattgctgatcaagcttgcattttcttcccgtgttacataataagacactccgagaaggctgaagaatgtttttgtgttcttaaatccttcatctaagagaggatcatacgaaaacgttttggtgaaatccataggaacaaaatgaagatgacccggaattgtcagatttgcatccttcagcttattttttttgaattgctgtgtagccggatggtcaacctcgaaaacctgtaagctgttttctaattctggatgccgaaagcagaaggtatccagccccgctccaagaatgacatactgttttgcccccaggattaattcgttgtgcaagactttttcacaataagaagcacgtgctagtggcgtgggagacagctggatttgtgcaacccattttaatattttttcaggatcattttgaagacgttcggcgatctctttgttgaaaaacgatattccttgaatcatatttttactgatgtcgataaactctttttcgttaatgagatcttttgcgataaaatcatcaaaaataagagatgtgtcatatttgctgtgataagcacgggcaaacgctgaaatcaaagacgttaagctggactcatttttcctcatgaaatgatcctccacaaaaaataagattctcctggccaggagaatcttattatacatacaaatatattaatagtaaattttagcataaataaatttttttgtcaatgtttttgctcttaactggacgcgcgatccttcacatagccacgtgacctgtagcagaattcgtctatcaattatgtggactgaatcattagcttttataaaatgcgtacttgcggctgcatccctctttttgcaaatcaggagcggttttctgtctcatggcagcatcttttcgtcgtttcagctgagagagaaatcaagatatgtaacaataaaagcctgagggatctcaggcttttcctaatattacaatccaacagcattccaggctgcttcaactttagcggcatcagttgagccgtagaggtcacgggcagactgaatgagagctgccttggcatctttgaacgtggaagaaggcgtgaggtacgttgttaacgcacggtaatagatttgctgtgatttagatacaccaagttttgtgatggtgttgtaagcggctttgtttggaattccgctgtttgtgtgtacaccgccataatcgccttcatctgtgtttggaaggtttcggtaattggcgtaattgtcaggctggttgtattttgtagggttggacaggctgcgaagagcaggctggctgaccgtaatgtcttcaccgatgtcccagtcttctgtatcgttaaaatacccgaatacgtcagagaaagactcgtttaatgcacctggctgattttcataaatcaagttggctgtttcttgggtgacgccatgtgtcatttcatgcgctgtcacatctaatgagccggaaagcggagagaagaatgaaccgtcgccatcaccgtaaatcatctggtctcctgtccatgcagcgttattgtattgagtgccatagtgaacggaagaaacgattttactgcctttgttatcatagctgtttcgtttaaagtttgaataaaaataatcgtacactttaccgaggttatagtgtgcgtcaacggctgcccgctgtgatgaagatgtaaatgttttcgttgtgcttgagacaagcgttcccggaaggcggctttgtctgttttgcaaatcatatgtgatgatttgggtgcctgttggttttgaaagatctcttagaacatattttccgccttcataagagatgttcaaaggaacagttgcgccctttagagttgttccgcttccagtggcggcggcatgttctactttattttgctgttttaaaatgctgcctgtttcggcgtcaactaagacttcccagtttgcaggttcaggctcgacatagcgaatcgtcacgtcgtaagcaagacgatagctgccgtcttttgtttctatggctttcaattcggctttattgctgtttttggccgctccgttagaaacagcgtctggtgatttgccgatagctttgaaagcgagtgccagcgctttttcagaagagactttttggctgttatctgtttttgcagcagattgattgtgtaattcaccattgaccgcatagacattatcggatttatcgacgtgaacgatcacttgcgaatctttaattggcactccgttaacgacaggcgcatatcgaaagtgcttgtatccaagggcatcagtcgtgctttcaacaagcttcagccttttggaaggatcacctttaaaaatgttgctgttctttttcaaaaactgcttgacagccttgtcatttggtgcagagagttctgattgcgcaatcgcatttttggagaggaaatttgtttgattctctttaagctgatgaccttcagcagcctgaacacctggcaggctgattgataaactcataaacgaagcagcgacagcaacagacaatttcttacctaaacccacaataaatccccctttttgaaaatactgaaaactttatattgttatattaaactagcattctggaatactcaacaaaaactaacataactagacaaaattgatagtattgtcctgtgtttgtttttgttgaataatatcaagatgagtcaagtgtcatgtggtggttcattcaagagttatgttttttacatatcaaggggaagatgagatatttttgtttcatcttgaaactttttgaaaagtccgctgtctaaccgaatgaggccttaataagaagtaaaggattgttgttcgtgttggagttattcagtcattatgtattgcatttcgaacgttattttatattaagcagacaaagcaccctgctgattcaatggtcaattgttgttctggcgggtttatatcttttggggcatcatcccaaaataaaccggcagcgcacaatgttcatggcgggtgttatattgcggattgtgctgctggcgggagtgtctgttgaacttattcaccaagtgcaatcaacaaacttcaccagcgcttacttaagagaggacggaaatgaactgctgccgctgctgcattttttgttatacggatatgtgctgctaacggcttttcactatatgctgatgccgcgtgatcatggcggaaagggtaagttttatacgttcgaccttgccgttgtcagtttgccaatcgtacaaatgatttttagtttcttttcgtattggaaggaatacccggatgggatggagccgattgcattcgtgtttctgtttttcatcatcactcttcccattgcgttgaatgtagtgtttttcaagctgcattggagaacggataagatcttactaggcttattttatacgctgattatcggactgcttgtcttgctgcttgtgccatatcccaatcaaatctcaaaagattatggtgcagtaatgccatatacgatttatttggcaatggcgggatttttgatgagctatcatctgttccaaaagtcaggaaaggtttatgtgcgtgtgaataagtgggtgacgatggctgtcctggtgttttttgtcctgctgttaaatccgatatataacataggaacggctgctttcgctgtatcaaagccagcaaatgtccatgattcattcaattttgtcggggagcacatttcatcagaaaaagcggaacagatactaaagtcattttttcctacggatgaaacactttatttgcacgatacaaacatggatgtgcattatttctactcatttgaaagcaaaggttacaaagctgaggtagatgaagtatcgcagctgattcgtaattatgaatacttacaaaaagcacatgggaaaaagctaacgaatcaggagtacaagcgaaagtccatcgctttccttgagcgacacggacgtgtgttacataaggatcatatcgaaacaaaggtatctcaagaagacggccagacagtcgtacgtatttacctgaaaaaccagcttcataaaaaagatcatgctgatgatggcgcggtattttattgggaaaaggaaaccttaatggggtttagtgaagatccttcgatttatcagcttgactctcttctgcatgttcatataacggaacaagacattcacgacaaagtggaacaaatgtttacagcgctgaacatatcaaaacagccttatcagatcactgatattgaaagcgacagcctgcttggaagcatggtgagagttgaaacaaaaggtggaattgttttggaatttgagggcgaatcaggttgtttacatagtctttcgcttccgatgaaaaagaatatctcaatggctaacagccggctgcagcatcagatattatcgatcttcgatgctcgtggatcagaaaagaagaaaaaaagcagtcagggtgacatggtgatgtatactgattcttctaaaacatatgagtttgttgaagctcaaggtcagctaaacgtttatgtatacagcgatacacctgatcagtcattcccctatacgtatcgtaatggaacattggcttacgaaaaagtagcttctctatatcaggatgtcatttacaaaaagcgtatgcgtccgattatcgttcaaagaggggatgaacggcattatgcatggctgatcattattcagccgtttggttcaaatcgccatgatgcctatgtagtggatggagaaacacaagaggtgaaaagtctttatgaatcataaagaaaaagagtctgtttttgtagacttatacgacctgtataaagaaggagagctagaggatgaatcaatggaatggatgaaacagcatgaatccctatttcaaaagaatgcggaagacttaaagagtaaaacttgtttaaagagaagtcccggtgctgaagaagaaagccaaatcagatatatgaaagtatacctgtcttccatgtatatctgtttcattttattggccatttggatgacggtgtggttttacttttaatgaagcatagggattccattgaggacttgtatcggcagtattatcaagaaattttaaattatttattcagaaggactcatcatcttgaaacagccaaggacttagcgcaggacacgtttgtgaaagctcttaatggtctggcttcgtttagggggcattcttccatcagaacatggctctacaccattgcgcatcatacctttatcaattggtaccgaagggatgtcaaataccaatttactgaaatcagcaaaaatgaagggttaacgcaaacaacttatgagcagcctgaacagtatctgtcacgaacggtgaaaagcgaaacactgcggcaggagctcctgaagttaaaagatcagcatcaatccgttttgattttaagagaattccaagagctttcttatgaagaaatcgctgagatattgggatggagtctttctaaggtgaaaaccacattgcaccgggctagattagaacttaagaaacacatgacgaaaagtagagaggaggagcggatatgacctgctttctagtaagagacctgcttcctctgtatcttgaaggtgattgtaaaagagaaacggaacacgttatagaagagcatttaaaaatgtgcagcagctgcagagacatgtatgacacgatggctgagccatttgaattggaaagcgaacaggccgttgaggaggcttatctgccggaagaagaactgcgttttaaacagaggtactatggattactgatcatgaaagctgcctgctggtttggagcggtggttgccatgatgctgatcatcaaactgctgatataaaaaaagcgcttgtccgattccggcaagcgcttttttacattaagcctggggatgaatcatatcgtaaatagcggcaagctgttcttgtgacagggcactgaagagtttttcataaacgtcagcttgcagtggcgttgcacctgcttgtagcgctgcgtctttatcatagctgtacacatcatcttgtagcacaatggctgcttgaagaatgtgaatcttgagagaaacagcggagaaaaattgttcaagtgcaagtgcttctttttctgtgaagccaagttcaattgctttttctgtatcaaatttgtaatttccatcctcgagatacacacattgtgaaacaatgctgaaaaattctgatgtcgattcccagagtgtagcaattacctgagcctcttcttttgtcattcctaactcgacagctttttcgctgtcaaaataatatacaccgtcttgttcgtaaatacattgatttaatatatcaatgaatgtattgagatcttcgttagtgctcgcctgatgctggagttgaacagcagtgttatcaaccggtgtttttgcgctggctgcatcagaaccgaacgttaatagagcagctgaggtcattgcggcagtcgttaacatagctttttttacaaatgttttcttcatgtttcttctctcccttttatgaattgtgctacaaattccattatagggagtagtttccggtgaaggaataggcgctatggtattttatgtgtatcgttgccgaactactttttgaaggctgcacgtgtgatcgttagaacgattgtctatgtatgaaggctgttttgcatcttcctgactaagaaacaggggagataaggcttaaagaaatgaaaaacaccgctttctttgcggtgttttttgattacaatgtcgccggcggggcaatgcttttaatcaagcaagccttgttcgcgcattttcttttttaatgtaaatccgccgcccatgacagcgcaaacaagtacaatgctggcgataatgcctgcagggcttttttcagcgataaagacgccgatcagcataatgctgaaaaccgctgcaaatgcaaataatagtaaaagccaattcatttttttcataaattccatccccttttacgtcttatattaagtttacagaaaaacgtgacgcttttaaagaggatgtgtgatataatatgaaagttatctaatttttttaggagatgaaaaagtgaaacttcgaaatgatcttcgcaacatcgcgattattgcccacgttgaccatgggaaaacgactctagtcgatcagcttttacatcaggctggtacgttccgtgccaacgaacaggttgctgaacgcgcaatggactctaatgatcttgaacgcgaacgcggcattacaatattggcgaaaaatactgcgattaactataaagatacacgtatcaatattttggacacccctggacacgcagactttgggggagaagtagaacggattatgaaaatggttgacggcgtagtgcttgtcgttgacgcatatgaaggctgtatgcctcaaactcgttttgttctgaaaaaagctcttgagcaaaacctgaaccctgttgttgttgtaaacaaaattgaccgtgactttgctcgtccagaggaagttatcgatgaagttctggatctgttcattgagcttgatgccaatgaagagcagctcgagttcccagtggtatatgcttccgcgattaatggaacagcgagtcttgatccgaaacaacaggatgaaaacatggaagctttatatgaaaccattattaagcatgttccggcacctgttgataatgcagaggagccgcttcaattccaagttgcccttcttgactacaacgactatgtaggccgtatcggaatcggacgcgtattccgcggcacaatgaaagtcggacagcaggtttctcttatgaagcttgacggaacggcaaagtcattccgtgttacaaagatttttggtttccaaggcttaaagcgtgtggaaattgaagaagcaaaagcgggagacctagttgcggtttccgggatggaagatatcaacgttggtgaaacagtatgtcctgtagaccatcaagatccgcttccggtgcttcgcattgatgagccgacacttcaaatgacatttgtcgtgaataacagtccgtttgcaggccgtgaaggcaaatatgtaacggcccgcaaaatcgaagagcgtcttcaatcacagcttcagacggatgtgagcttgcgtgttgagccaactgcttctcctgatgcttgggttgtttcaggacgcggtgagctgcacttgtcaattttaattgaaaatatgcgtcgtgagggctatgagcttcaagtgtcaaaacctgaagttattatcaaagaaatcgacggcgtacgctgtgagcctgttgaacgtgtgcaaattgatgttcctgaagagcatactggctctgtcatggaatcaatgggtgcccgcaaaggcgaaatggttgatatgatcaacaacggaaacggccaagtccgtctcatctttacagttccttcccgcggattgatcggttactctacagaattcctatcattaacacgcggattcggtattttgaaccatacgtttgacagctaccagccgatgcaggcgggtcaagtcggcggacgccgtcaaggtgtacttgtgtcaatggaaaacggaaaagcaacatcatacggtattcaaggaattgaagaccgcggtgtcatcttcgttgagccgggtactgaagtatacgaaggaatgatcgttggagagcataaccgtgacaatgaccttgttgttaacgtcagcaaaatgaaacagcaaacaaacgtccgttccgcgacaaaggatcagacaactacaattaaaaaagcgcgcatcatgtctcttgaggagtctctagagtacttaaacgaagatgaatattgtgaagtaacacctgaatccatccgtttaagaaagaagatcctcaataagaacgaacgtgaaaaagcagctaaaaagaaaaaaacagcaggattgtcttaatctcgtgcagaatttgaaaagatagaacccgtacgtttacaggggagggaatctttttgaatgacgtaagcgaacgtctgtcgttcttcgccgctctatatcaagtagaccggcagcctgcggcaggcatgtggctgctgtacggcacgatttttgtgttggccgttattgtatttaagcttggatttgctaaacggcttcctgtattaaaatctgcagtggtgtatgtatttttggcgttgggctgcactgttttgacttttttaggggtgtttttgcccgtggcagaaggattggtcgtcgctgcgctgattttaatcacttacaaaatccggctgtatcagtcgaaaaaaggacagtctgcaaaatcataaaagactcagctgaaagctgagtcttttttgtgttctgtatggttaagcggccgctttattttttgactttttcttttttctgctgtcccgggtgaaaagtaaattttcccgttttcagccgttcctctgtttttttggcaatccgatcgtgacattcctggcacatatatgtatggatcgggcggtttcgaagccgtttcgcgatcagggtatcatcatcaattgtttcaattttatcgcaaatagaacatttgaccctcatcatatcacctctttcactaacatgtattatagcacggatcagaagctgtccaaaataagaaaaagctaaagcgcaaggctatagcttagtcattgttgttctttttcatatgatgatcagattgatcgttttgctccttctccatttcctgctgctgttttctatttaattggtcattttgctgctttgtttgcggttcgtcttcattgtcaatcacgtcgttaggcacttcgggaagcactcggccgacaattgcagctaattcatccagtatgcctgttaccggatggccctcgctgatttctctgctcatttcacgaaggcggctgaccgtatcgggatcagcaatgaccactgcgtttgcgccatatcgatcattctttagcgcctgagctacagaatatttaatggtttccactttgcttctgtccaaagtatcatcgacatcaatcccaacaacagcatagcctcccagcacaacggctgttgcatccttgacgtcggggtttttttcagcaacgctgacaagatgcttggcaatatcggttcttgttccattgtcttttgtttcttgagttgtgtcctttacgtgaatcggtttagtctcctgctgtcttgttgattctttttcaacattctgaccctgttttccttgttgataggcacaagcggacaggataagtgtcagctgtatgataatgaaaagaattcgcacttgcgggttccctccttaaaatgctttcattaattttattgttgaattaaccttctatctttatgcacaaaaacatatattttagcaggcattcacctttttcatcaaaagagaagcaggaagaactttgacccttatatcaggaggctgagacttgagtaaaatttatgtgttagatacgaatgtgttgttacaggatcctaacgcaatattttcttttgaagaaaatgaggttgtcatccctgctgtcgttttagaagaggttgattcaaaaaaacggtatatggacgaagttgggaggaatgcaaggcacgtatctaagctaatcgatgcgctaagacaaaagggcaggctgcatgagcatgtaccgcttgacaccggcggcacactgagaattgaactgaatcatcgttcgtttcaccagctgcaagagatctttattgaaaagacgaacgataatcgcatattagccgttgcgaaaaacttaagcctcgaggaagaaaccaaggaaaatggcaggccggttatcctcgtcagtaaggatgtactggtcagggttaaagccgacgcaatcggactgcttgctgaagatttcttgaatgaccgggttgtggacaatgatgaaatgtacagcggctataaagatttatatatcagccagcagctgttcagctctttttacggaaaaaatcaaatttcagtaaacgatgtgaaacagcatgcgttttatccgaatcagtttgctttaatgaaggatgagctaggaggatcctcctcggcagtcggaattgcagataaaaccggaacggtattaaaaagactcgtatttgatgatgaacatatatggggaatcaggccgaaaaatgtacagcagacaatggcattagagcttttgctgcgggaagatattccgcttgtcaccctgatcggcaaagcgggaaccggcaaaacgctcttagctttggcggcagggctattacagacagaagacttgggaatatataaaaagctggtcgtcgcaaggccgattgttcctgttggcaaggacatcgggtatttgccaggcgaaaaagaggaaaagctaaagccttggatgcagccgatttttgacaacttagagtttctgtttaatgcgaaaaaaccgggggagcttgatgctattttggcgggaattggctcaattcaggtagaggcgctgacttatatcagagggagaagcattccagatcaatttattatcattgatgaagcgcaaaatttgaccaggcatgaggtgaaaactttgctgacgagagtcggtgagggcagtaaaattgtcttaatgggtgaccctgaacaaattgatcacccatatttagacagtctgaacaatggtttagcctatgtggttgagcggtttaaaggacaacccatctcaggcagcgtgaagctgttaaaaggtgagagatcaggtctcgcccagctcgcagctgatttgctgtaacattaaatgatttcgatctcttttacgtcggtaatcggctgtttgtgatgaaccgggtcttcaaagtaaatatgcacggggccgccttcttgaatcggcttgcctgcctcactgaaatggacaatactgttcagagcggtttccagagaaacggcggcctttcccgaacttgtgacaaatacacattgcgtcgcagagctgttcggctcagcatttttcaggacagtcccaagtctcattgcgaaactgccgttcatcagtttttgcttctcatattgcttttccgtctttaatgtaggcggcgcaattcgcccctctctgatgacgcgttccggatcaaggtcggattcatccccggctgattgtaaatatatgtcttgactgtcccctttgcggtcaaacgaaaatttgcgatcatcaaaaatccatacgcttggatcaatggtaattgggtatgtaacattgccttttacttggataacgctcatgatatgacccccttctctcaaaattataaaagttttcgcatgaattgtcactttgtgtacaaattatgtgtattgaaatgctgagggaacgagggtgtttgcatggtatgccggcataatgatgagcttgaagccttagtgaaaaaggcgaaaaaagtaacggacaagggggagatagccagctatattcccgccttggcaaaagctgataaacacgacctgtcagtagcgatttattattccaataatgtttgtctgtcagcaggtgacgtagaaaaaacatttacgcttcaaagtatatcgaaagtcctttcccttgctttggtgttaatggaatacggcaaagataaggtcttcagttatgttggacaggagccgaccggtgatccgtttaactcaattatcaagctcgaaacggtgaatccgagcaagccgttaaaccctatgattaatgccggggcattggtagtgacaagtctgataagaggaagaacggtgaaagagagacttgattatttgctttcttttatcagaaggctgacaaacaaccaagagattacatactgccgggaagtggctgaatctgaatacagcacttcaatgattaatcgggcgatgtgttattatatgaagcagtacggcatttttgaagatgatgtagaggcagtaatggatttatacacgaagcaatgcgcgattgagatgaacagcttggatttagcgaaaatcggatctgtatttgcattgaacggcagacatccagagactggggagcaagtcatctcaaaagatgtcgctagaatttgcaaaacatttatggtgacgtgcggaatgtataatgcaagcggggaattcgcaattaaggtcggaattcctgcgaaaagcggcgtatccggcgggattatgggcatttcgccttacgatttcgggatcggcatattcggccccgcattagacgaaaaagggaacagcattgcaggtgtaaagcttttggaaataatgtctgagatgtacaggctgagtattttttaatttatgtcatatgcttaaatcctcttgcattttctgttgataccctttatgataaatagaagaattaggtactcgcctggggaacggagggatacttttggcttcagagatgatagttgaccatcggcaaaaagcttttgaactcttaaaagtggacgctgagaagattttgaagctgatccgagtacaaatggataacttaacgatgcctcaatgtcctctatatgaagaggttttagatactcaaatgttcgggctttcgagggaaatcgattttgctgtccgcctgggattggttgatgaaaaagacggtaaagaccttttatacacattggagcgcgaattgtctgctttgcatgacgcgtttacagctaaataaatgataaaactcaaacttattaacagtttgggtttttttataaccgctatttttctctcatctcataaaagacggtctttttttacacattccttccgaatcgtatagagattcttcgtctcgtttgataaattgtagtaaaataaaaaagataaatacataaaaaccatagataatggaagttagaagcagggaagaggatgttatgttaaaaaaaatgctaaaatcttatgattactcactgatattcgcaatcgttttattatgcggattcggtttagtgatggtatacagctcaagcatgattacggctgtctcccggtatggagtaagcagtaattttttcttcatgcggcagctgtttgctttaattgcgggtggcgctctatttattctcatggcgttgtttccttataaagcactggcccatcaaaagtttcagaaggggatactgcttgtatctgttcttgcgcttatctcactgtttgttttcgggcatgttgccggaaacgcgcagagctggtttaaaatcggcggaatgagtattcagccgggggagtttgtgaaactggtcgtgattttataccttgcagccgtatatgcaaaaaaacaaagttatatcgaccatctgttaacgggagtagcccctccggtagtcatgacgcttgtgatttgcgggttaattgccatgcagcctgatttcggtacagccatgattatagggttaattgcgacgtgcatgatcttgtgctccggtttcagcggaaagacgctggtgaggcttgtgatactgggcggaattgttttcattttagtcagcccgattatctatttgaatcaggacaaaattttaactgaaggccgtttagcgcgttttgagagtcttgaagacccatttaagtatgcaaattcatcaggtttgcaagtgatcaattcttattatgcgatcagctcaggcggcattttcggcctggggctcggtgaaagtatccaaaaatacggatatctgcctgaatcacacactgactttattatggctgtcattgctgaagagctcggcatttttggggtattgtttgtgattttcttattgggttttgtcgtcataaaaggtttttatattgccagaaaatgcgaggacccgtttggaagtcttctggcgatcggcatttcaagcatgattgccatccagtcgtttattaaccttggcggtgtcagcggattaattccgattacaggggttacgctgccatttatcagttacgggggctcttctttggtgctgcttctggggagtatggggatattagcgaatatcagcatgtttgtgaaatattcagagaataagaaaaagaaagagcccttggcgccgaagggaatgaaaaagaaacagctcaaaaaaactgtttatctgtaaaaaacaagtgtgtacaggggaaggatattccgctatgatagattatattccattcgggtaagggggagaaaagtttgtctcagcaatcgatacaaaaagtattagtagcaaacaggggagaaattgcaatccgaatattccgggcgtgtaccgagttgaatattcgtacagttgcggtctattcaaaagaagattccggttcctaccatcggtacaaagcggatgaagcatacttggtcggtgaagggaaaaaaccgattgatgcttacctggatattgaaggtatcattgatattgcgaaaagaaacaaagtcgatgcaattcatccgggatacggtttcttatctgaaaatattcattttgcgagacgatgtgaagaagaaggcatcgtattcatagggccaaaatccgagcatctcgatatgtttggtgacaaggtaaaagcgcgtgagcaggcagaaaaagcgggaatccccgtgattccgggaagcgacggtcctgccgaaacgcttgaagccgtcgaacaatttggacaagctaacggttatccgatcatcattaaagcctcgcttggcggcggcggccgcggtatgcggattgtcagatctgaaagtgaagtcaaagaagcatatgagcgtgctaaatcagaggcgaaagcagcctttggcaatgatgaagtttatgtagaaaaattaattgagaatccgaaacatattgaggttcaggtcattggagacaagcagggaaatgtcgtccatctttttgagagggattgttccgttcaaagacgccatcaaaaggtcattgaagtggcgccgagtgtctcgctgtcacctgaattaagggatcaaatttgtgaggcggcagttgcgcttgctaaaaatgtaaactatataaatgcggggacggtagaattccttgttgcaaacaacgagttctactttattgaagtaaatcctcgcgtacaagttgaacacacgataacagaaatgattactggtgtcgatattgttcaaactcagatccttgttgcccaagggcacagccttcacagcaaaaaagtaaatattcctgagcaaaaggacatttttacaatcggctatgccattcagtcacgggttacgactgaggatccgcaaaatgatttcatgcctgatacaggaaaaatcatggcttaccgctcaggcggcggttttggtgtccgtcttgataccggaaacagcttccagggcgccgtgatcacaccatactatgattcacttctcgttaagctttcaacttgggctttaacgtttgaacaggcagctgccaaaatggtacgaaaccttcaggagtttagaatcagaggcataaaaacgaacattccgttccttgagaacgttgcaaagcatgagaagttcctgacagggcaatatgatacgtctttcattgatacaactcctgaattatttaaattccctaaacaaaaagaccgcggaacgaaaatgctcacttacatcggcaatgtgacagtgaacggcttccccggaatcgggaaaaaagaaaaactggcgtttgacaaaccgttaagcgtaaaggtagacgttgatcagcagcctgccagaggaacaaagcaaattcttgatgaaaaaggtgcagaagggcttgcaaattgggttaaggagcagaaatctgtccttttaactgatacgacattcagagatgcccaccaatcgttattggcaactagaatcagatcgcatgatttgaaaaaaatcgcaaatccgacggctgcgttatggcctgaactattcagtatggaaatgtggggaggcgcgaccttcgatgtagcctaccgattcctgaaagaagatccgtggaagcgtttggaagatcttcgcaaagaagtgccgaataccttattccagatgctgcttcgctcatcaaatgcggtcggctatacgaattatccggacaatgtgattaaagaatttgtgaagcaatcagctcaatccggtattgatgtgtttcgtattttcgacagcttaaactgggtaaaagggatgacgttagccattgatgctgttagggataccggcaaagtggcagaagctgcgatttgttatacgggagatatccttgacaagaaccggacgaagtacgaccttgcatattatacatcgatggcgaaggagcttgaggcggccggagcccatattctcgggattaaagatatggcagggctgttaaaaccgcaggctgcatatgaactcgtttctgcgttgaaagaaacgatcgacattccggttcaccttcatacgcatgatacgagcggaaacggtatttatatgtatgcgaaagctgttgaagccggcgttgatatcatagacgtggcggtcagctcaatggcgggattaacgtcacagcctagcgcgagcggattttatcatgcgatggaaggcaacgaccgccgtccggaaatgaatgtccaaggcgttgaattgctgtcccaatattgggagtcggtgcgtaaatattatagtgaatttgaaagcggaatgaagtctccgcatactgaaatttatgaacacgaaatgccagggggccaatacagcaacctgcagcagcaggccaagggagtaggccttggcgaccgatggaacgaagtcaaggaaatgtacagacgcgtgaacgatatgttcggtgacatcgtcaaggtaacgccttcctcaaaagttgtcggagatatggcactttacatggtgcaaaacaatctgactgaaaaagacgtttacgaaaaaggcgaatctttagatttccctgattctgtcgtggagcttttcaaaggaaatatcggccagcctcatggcggattcccggaaaaactgcaaaagctaatcttaaaagggcaggagccgattacagtcagaccgggcgaactgcttgagccggtgtcatttgaagcgatcaaacaggaatttaaagagcagcataacttggaaatttcagatcaggatgctgtggcatatgccctttatcctaaagtcttcactgattatgtgaaaacgacagaaagctatggagacatctcggtattagatacaccgacattcttctacggcatgacattaggtgaagagatagaagttgaaattgagcgcggcaaaacgctgatcgttaagctgatttcaatcggtgagcctcagcctgatgccacccgcgtcgtttatttcgaactcaacgggcagccgcgtgaagtagtcattaaagatgaaagcattaagtcttccgttcaggaaaggctgaaagcagaccggacaaatccaagccacatcgcagcttccatgcctggaacagttattaaggtattggctgaagcaggcacaaaagtcaataaaggtgatcatttgatgattaatgaagcgatgaaaatggaaacaacggttcaggcgcctttctcaggaacaatcaagcaggttcatgtgaaaaatggtgagccgatccaaacgggagatctgctccttgaaattgaaaaagcataataaacaaagagtgtatatcatttgatatacactcttgtttttttatatagaaaatgtggagtgaaacagatggttagaagagatataaggggacttcagagattatacaatactgtcacaagcccaaaataaatagaggcttatacagccaatattttagatgctttgtagtatgccgtgcatatttctttaagcactatctgatttaaaaggctttaatacttatgttcgcgggctatagatgcatatgaaatttctataatcacgatgagaaaggggacagcccgaagtgagccgctcactgatcatcaagttcagcgaaggctggcgattgaaacaataaagcgccaaaacaagacctgaaaaaagaccaaagccgcctaaggctttggtctttagtccttatgattgactagattcgtaacggaaacgagcaatcaataataagaagtagcatagaacgccaaacagacaggcaataaagaacgagtgggcaagtgcaaagcccagagccagttcagagtatacgatcataatcccggacagtgcctgtaatgtaatgaaaataagacatgagatccatccccaaaagatctgtttttgatctttataggagataatagcatgaacagcggcaacaataatccatacaaataacagtaaggctgctgctctgtggcccatttgcacccattcatggaattgggtcggaagcccattgttcagcgggctgcacagcggcacatcaggacatgccagacttgattcagtgtgtcttacatatgcgcctgtatacacaacgatataggaatatattaaaattcctatcatgtgaaattgcatctttttgccgatttgaagcggcttaaccagtgttctgactgatttatcagcttcaaatatgagcaatgttaaaataagcactgaagcaaaagaaattaatgagatgccgaagtgaagcgccataatcagcgcgttcgaaccgaatacgacagccaatgcgccaagcaatgcctgaagaaataaaaagataattgacatgatcgcgagaaacgttgtttcacgaaaaatcggcgtgatttttctccatgaccaaaacgcaaggcttaacacaaggacaatagagattccgcttgcgaatcggtggctccattcaataattgaagccggattcagttcagggaaaaaacggccgtgacacagcggccactgtctgccgcatccttggccggaacctgtttttgtaacgagggcacccccgattaaaacaattagcatgacaaatgtcgtcagaacaccgagagcttttaatgctttattcatacaatattcaccttcttaacatactgctgcaattttatatacgttccaagtgtaagcgaatatgtgttttgtggcaattcccagagccttttgttcacaaaaatataatagaatgacggcttctggaaaatgtacacttgattattcatgccgggtctgatagaaataaggtaaacgcaatgccgatttggagattgccttcatctttggtaaaattcataaaaagttcacaaataaattcctgtttgtcgtttaatatttaataggatgtttttttacaagatgttatcttgtatgatagagttgcaggttattttattctcctgcgttaggtttgtaagggaggtttacgttatggctaactccagaatcttaaatgatacagctatagacggacaaattgaagaaacaacggcatggaaagattttctgtcccttattaaaatagggatcgtcaattctaacctcatcacgactttcactggaatgtggcttgcactgcatatatccggtttaagttttttaggcaatataaacaccgttcttcttacgttaatcgggtcttcactgattattgcgggctcctgcgcgatcaataactggtatgaccgggacattgaccatcttatggagcgtacgaaagtaagaccgacggttacgggtaaaattcagccgagtcaggcgttatggtctggaattttgctggttgctttaggattgatcatgctgctgatgacaactgtcatggctgctgttatcggttttatcggagtctttacgtatgttgtattgtacacaatgtggacgaaacgccgctatacgattaacacagtagtaggaagcgtttccggtgcagtgccgccgcttattggatggacggcagtggaagggaatatcggtgtcgtagcatgggtgttattcatgattttatttatttggcagattcctcacttcttagcattggctattaagaaaacagaggattacagagctgcaaatattccgatgcttcctgtcgtatacggatttgaagtgacaaaaagacaaattattgtgtgggttgcgtgcctgatgccgcttccgtttttccttggtagcctgggtcttccgattgtcattctcggcttgctgttaaatatcggctggctgattcttggcttaatgggattccgctccaagaatatcatgaagtgggcaacacaaatgttcgtttactcgcttaactacatgacaatctatttcgttgccatggttgtcttgacgcttttctaaaaaatagatatgatgcttgttttatcgcttcaaaataaacgatgacaactagtaaatgccgccttgacctcttgtttaatcaggcggctttacttttatacatagatggcattttgagtaaaaaaactcataatttaagagaagaggaaatgtaagtgctttattggtgataggttggatggcgatagatttcgatccgctttccgcctttgtattgaccagaaaaggggttgggtgaaatggtaaagcattggcgtcttattttattattagccttagtgccgcttctattaagcggatgtggaaaaccttttttatccacgctcaagcctgctggcgaggtggctgataaacagtatgacctgacagtgctcagcacattgattatggtggttgttgttgcagtagtatctgttatcttcttttatgtgattgtgagattcagaagatcacgggtcggtgagaacacgataccgaaacaggtagaggggaataaatttttagaaatcacatggaccgtgatcccgattttgctgctcattattcttgtgattcctgttgtattatatacgctggagctagcggacacatcaccaatggataaaaaaggccgcaaagctgaggatgctcttgtagtcaatgttagggcaaatttatactggtgggagtttgagtaccctgattacggcattatcacaagccaggagctgattgtaccgacagatcagcgtgtatattttaatttaaaagcctctgatgtaaaacattccttctggattccttcagttggaggaaaacttgatacgaatacggataatgaaaataagttcttcctgacatttgattcaaaacgaagcaaagaggcaggagatatgttttttgggaagtgtgcagagctttgcggcccttcacatgcgctgatggattttaaggtgaagacgatgtctgcaaaagaatttcagggctggacaaaagaaatgaagaactataagtctacagcagagagcgatttggctaagcagggtgaagaactgtttaaagagaaaaactgcctgagctgccatgcggtagagccgaatgataagcgtgcagaagccgctagaacggcacctaacttggcgaccttcggtgaaaggacaaaagtggcaggggtgaaagaggccaacaaagaaaatgtgaaggcttggctgaaggaccctgacagtataaagccggggaacaaaatgacaggcacatatccaaagctctcagacagcgaaacagatgcgctttatgaatacttaaaaggcttaaaagcggaaagcaagtagggaagaaagggagatattgggggaggtcacatatgttgaatgcgcttacagaaaagcggacgcgcggatctatgctttgggattatttgacgacggtggaccataaaaaaatcgcgattctttatttagtggcagggggattcttctttcttgtcgggggaattgaagcgatgtttatcagaattcagcttgcaaagccggaaaatgcgtttctcagtgctcaagcgtacaatgaagtaatgactatgcacggaacgacgatgatctttctggctgcgatgccgctcttatttgccttgatgaatgcggttgtgcctttgcagatcggggctcgggacgtttcgtttccatttttaaacgcgcttggtttttggctcttctttttcgggggcattttcttaaatctaagctggtttttgggcggagcgccagatgcgggctggacatcatatgcctcactttcgcttcattctaaagggcacggcatagactttttcgtcctcggactccaaatatcggggctcgggacgctgatagccgggattaactttttggccacgattatcaacatgagggctccgggcatgacgtatatgaggctgcctttgtttacatggacgacatttgtggcctcggcattgattttgttcgcgtttccgccgcttacggttggattggctctcatgatgctggatcggctgttcggaaccaatttctttaatccggagcttggcggaaatacggtcatttgggaacatttattttggatttttggccacccggaggtttatatcctaattttgcctgcattcggtattttttctgaggtcatccctgtgttcgccagaaagcgtttgtttggctattcttcaatggtttttgcaatcgtgctcattggctttctgggctttatggtttgggtgcaccacatgttcacgactggtctcggcccgattgcaaatgcgatttttgcggttgcaacaatggctatcgcgattccgaccgggattaagatttttaactggctgttgacgatttggggaggaaatgtgaagtatacaaccgctatgctgtatgctgtctcatttattccatcctttgtgctcggcggtgtgacgggagtcatgctggcagctgctgcggctgattatcagtttcatgatacgtattttgtggttgcgcacttccactacgtcattattggcggcgttgtattcggccttttagccggtgttcatttctggtggccgaaaatgttcggtaaaattctgcatgaaacgatggggaaaatttcatttgtattgttttttatcggctttcacctcacgtttttcattcagcattttgtcggcttaatggggatgccgcgccgggtttatacgtttttgccaggacagggtctggaaaccggcaacttgatcagtacaatcggggcgttttttatggcggcagctgttattcttctgctggtcaatgtcatatggacatcggtaaaaggtgaatatgtaggtgctgatccatggcatgacggacgtacgctggaatggaccgtttcttcaccgccgccggagtataactttaaacagcttccttttgtcagaggacttgatccgctttggatcgagaagcaggcagggcacaaatcaatgacgccggcggaaccggttgatgatattcatatgccaaacggctcaatcctgccgctcatcatttccttcggcctttttgttgcagcgttcgggctgctgtacagaagtgattacgcttggggtctgccggtgatctttatcgggctcggcatcacatttattacgatgctgcttcgttcagtaattgatgatcacggctatcatattcataaagaggaactgccgaacgatgataaaggggtgaaggcataatgcaagttcaagaaaaattcaccgcagaaacctttccagcttctcctgaaaaagtaaccctggaagggaaaaataaatttttaggcttttggctttttcttggcggagagactgttctgtttgcgtctctcttcgccacgtttcttgcgcttcggaattcaaatgccggtgatccgcctacgacggaaatgttcgatgtgacacttgtattcattgccacaatgcttctattaacgagcagtttaacgagtgtgtacgcgatgtaccacatgaagaacttttccttcggcaagatgcagctttggctgggaattacgattttattgggggcgggctttttaggactggaaatctatgagttcaagcattacacccatgaatttggctttactatcacaagctctgcccttggttctgcgttttacacgcttgtcggtacacacggcgcccacgtggcatttgggcttatgtggatcagcacgcttatgatccgcaatgccaagagagggctgaatctgtatacggcgcctaagttttacgttgccagcctttattggcactttattgatgtcgtgtgggtcttcatctttaccgttgtatatttaatggggatggtgggataaacatggtcgataaaaaaagcagagggcatatcaatagcgaccttgaatttaagaaaaaaaagcatgcccgggagatgaaatatcaagtcctgtcttttggtttaatgatcggtcttacgattgttgcatttctgactgtggccacggacggtgtcggcagctggtttacgattcctttcattattttgctagctgcaattcaagtcatctttcagctgtattatttcatgcatatgaatcagaaagggcatgaggcgccggcactgtttttgtattcaggggtgtttgtcgcgtttatcactgtgcttgcgtttgtgacaattatatggtggtaatttgaacagccgccggaggtgaagaaatgaatcagttggagatatttgggtttcgcgcgatgtggagcccttatcttttttgtatcctgttaggcattacggcgctttatctctatttttacaggcgaatgtcttcaaagccgaatcgaataactggtaaagagatggtgtgctttctgtcggcgatgctgtttttatatgcagccgagggaagcccggttgatctgctcggacatattatgttcagtgcgcatatggtgcagatggccgtcctgtatttggttgtcccgccgcttttgatcgcgggaattcctgcatggctctgggaaaaaatcattttcaggccttcaatcaaaccggttttttcctttttttcgacgcctttaattgctttgcttttgtttaacggcattttttctttatatcatgtaccgcttatatttgatactgtcaaaaccgatccattttaccatacattaatcacttggcttatctttgtgcttgcgttcttcatgtggtggccgcttgttcataaggttgagcgtctacggcagctcagcggcttgatgaagctgggttatattatggcggacggtatgctactcacacctgcttgcgccttgatcatgttcagcggtgcaccgttatacgccacctatacagatccggctttatgggctgaggcaatgaggctttgcgtgccagcggatatgatggggcaggtcccattaacagggccagagatgttgaatacactgcctttgttagaggatcagcagctcggagcagtcatgatgaaaatcattcaggaaattgtgtacggtacttttttggccgttatttttttccaatgggtgaagaaagaaagggaaaaggacgggcaggaggagccgccgtatattcagcagacgatatcataaaaggtacagcgaaatatgctgtaccttttcgttacatttgaactgtttttaacatgttggctatgtcctgaatcagtgccttgctttttgtcacaacctgtacgggaaactcttccgtttctccatattctactccatgcgggtagtaatgctttcctaggagaggggacattaattgaatcacggcgcgcccgcttccgacatcgccttctgccgcaataccttgtatccgcaggtaaaacgtaccctcaatcgtcgaaaacttcttgtcataggtgactctctcgtaatcccattgacccgctctaatgagacctttgctttccattaagtcgtctagccagctgagctcagccttaaccccttcaagtccgctttcagtaaacttcaacactgacccctccttataaaaattacctttcctgacaatcatagtatgaaagcgttaaactttcaatgaatcttcttcttttgaaagtatgcaaaaattaaattttgacgacaatagcactagactaaaggaggttaaacggatgacaaaaataaaagatctgatgacagccgacttgcaatattgcacggtattagataatgtatatgaagctgcagtaaagatgaaggacgcaaatgtaggagcgattccggtagttgatgaggacggggaaacattggtcggcatcgtaaccgaccgcgatctcgtattaagaggaatcgccatcaaaaaaccgaactcgcaaaaaatcactgacgcgatgactgaaaaacctgtcagtgtggaggaagatgcttcagtcgatgaggttcttcatttgatggcatcgcatcagctcagaaggataccagttacaaaaaataaaaaactgactggaattgtcacgcttggtgatctttctttatctgagcaaacgaatgaacgtgccggcagcgccttatcggatatttccgaaggtgataatagagaagaaggcttttttcattaacacataaatctttgacatgttaaataggctgtattgtaatgggatgtaaacaagagattgtgaatcgccacgggggtgatagattgaaaaatatattgagagcaatggttatccttttgattatctgcggaacttatgttctgtttattcaatatggatctgttcctgaaaagaaatcaaatgacagcgagcctcaggtgtcgaatgaggaagcgcaaagcggcaaacgaatacatatgccgacttcagggttattgtccttcatgggcaagcccgccgatgaagtaacgaaaaagcttggggaacctgaacgtattgacccttcggcttatgattacgattggtgggtatacaatcaaggtaaggatcaatatatccaaatcggggtattaaacaataaagtggtcacattattcgcgtcgggtaatgatattaacgccaagcctttcaaaattggagaatcaactggcgaagtatttaagaccacccaggtggcaccatttgtgaatgtagagtataaaggaaattcctatcggtttgaattttctgaagaagatatcaatacaagaccgactgtaaaggtaggaaagatgtatgtccagctgtatatggacaaatttgaggggaagctatccagcattagggcgtttgatgcgcaaacctttgtaaagcaaagaccttatgaggtagtgtaccgcggggaattaattaaaccgaaagccgtttcagatgagaaatggaaaaagatccaaacaacgagcgaaaagcaaatccttgatttgacgaatgtcatacgcgttaaacatggacttgcgaagcttgaatgggatcagccaacggcggaggtggcgtttggacatagtgaggatatgaaggaaaataattatttctcccatgtctctaaaaaatacggctcgctgaaagaccgcttagaagaagggcatgttgactttcagcaagcgggagaaaatatcgcatacaattatgtggacggtccggccgctgtagaaggctggctgaatagcgaaggccatcgaaaagcgttgctgaattcagattatacgcatcttggtgtcggagtagaccggaaatattacacccaaaattttattaagcgatggtaatgaaagccgcggacgaatggttcccggctttttctatttccatacaagctggtctgaatgaatgtgctgatagcttacagataaggccgtttcccattccttcagtcaggctttttcaccagtgtatagggatatcgctaaaaattcatttgggaatgaatataggcgaacacaatgcccgacaaaacgatacattgtagtaggtaacgattttcggagggggtgaggattgtggcgaatcaacatgccaatcattcaatcaatgactttaaacaattcgtcaaaaagcatcccaagctgataaaagaagtgcgcaaagaacaaagaagctggcaggacgtatatgaaaattgggtcctcttcggggagagcgacccgatttgggatccgtatcgggaaccggaagaagcttctgaagctgtgcctgaaacaccgcaaaaaaatgattttgtctcgaaaatggtgacagcggtgaaaaagatggatgtcaatcaaatgaacgaacaaatcaataaaatgagccagtcgatctcatcgttgcaaagccttcttaatacattttccggaagcggacagaagcattctcagccaggctctggacagcatcctttttcttttcgaaaggattaaaaaaggggagctcatatgcgcaaagaggttcaggaatatattttagcaaacgaagaacggaaacgattcatcagagaacagccgatatggtaccgcaggctttcaagaaaaccggatgatctgtcctcctttcagcttgaaatgatgaatttttatgaaaaaaccattccgcatcgggtgaatcagtttacgaacgggattcaaatggcgcaaatgatgatgcaaatgtttcaagcgatgcggacaaaagattaaaaggccccgaaaaagggtcttttttcatgcggacataaggttttgtatacggctgcggttaagcattttccaattggctggtttcatggtaaactaacaactggaggtgcatgttatgtatgcgacgatggaatccgtgcggcttcaaagtgaagctcagcagcttgccgagatgattctgcagtcggagacggctgagaactaccgcaattgttacaagcgtctccaggaagatgaagaggcaggtcggattattcgttcttttatcaaaataaaagagcagtatgaggatgtacagcgttttggcaaatatcatcctgactatagagaaatatcccggaaaatgagggagatcaaacgtgagctggacctgaacgataaggtggctgacttcaagagagctgaaaatgagctccagtccattcttgatgaggtcagcgttgagattgggacagctgtttcggagcatgtgaaagttccgactgggaacccttattttgacggtttgtcttcatgcggaggcggctgcagttcaggcggaagctgcggatgtaaagtgtcctgacgagactggccgtctcgtcttttacatataagagaaaacaggcaggtgattgtattggagaataggcgccagggcatggttgtgtatctgcactccctaaagcagagcaaaatgctgaggaagttcgggaatgtgcactatgtatcaaaacgattaaaatatgtcgtactgtactgtgatatgaaccaaattgaaaaaacaatggacaagattgcgtcttactcatttgtgaaaaaagtggagccttcttataaaccgtttttaaaattggaattcgagtcaaagcttgataaggcaaaagaatacgattataaaatcggcatatagctataaaaaaatccccgcaggcatctgcggggtccttctattccttaatatgttaaggagaaggcaaagggagaggagaaaccggaggaagaacttatggggaaacgtaagtcttctccgcggttggcaacaacatcctctagatgctgttgcttatagtatggacaaggatcatgctgcctatacacctgtttatcaagattagcgttcattgtttggaagaatgctttatgttaagataggattgatttttttctatgtacatagcggcgtccggccgaataaagaaacaaaatagcttttagaaaaagtggtgtggaacatgagagtaatttctggatcaaaaaaaggccgttcactaaaggctgtacccggaacatcaacaagaccgacaaccgacaaagtgaaggaatccattttcaatatgatcggcccttattttgacgggggcatgggacttgacttattcgcagggagcggaggtcttggaatcgaagcgctttcacgcgggtttgagcattgtatattcgttgaccgtgattttaaagcgattcaaacggtaaaatctaatttgaaaacgctggagcttacaaaacatgcacaggtataccgcaatgatgcggaacgtgctttgcacgctgctgctaaaagagaaagcggctttcgcggaatttttctcgatccgccgtataaggaacaaaagctgaaagcacttttaacgctgattgacgaatatcaaatgctggaagaagacggctttatcgtcgctgagcatgacagagaggtcgagcttcccgaaaccgtaggagatcttgtgatgacaagaaaagaaacctatgggttaacaggtgtggcgatttataaaaagagggggtagtgaggtggcgagtatagctgtctgtcccggcagttttgatccggtgacctacgggcatctggacatcatcaaacgcggggcgcatatttttgaacaagtgtatgtatgtgtgctgaataattcttcaaaaaagcctttgttcagtgtggaagaacggtgtgagcttctgagagaagtgacaaaagacattccgaacataacagttgaaacatcgcaaggcctgttaattgattatgcaaaaagaaaaaatgcgaaagcgattttaagaggcttgagagctgtatctgattttgaatacgagatgcaggggacgtcagtaaaccgtgtgcttgatgaatccatcgagacattttttatgatgacaaacaatcaatattcgtttctaagttcaagcatcgtaaaagaagtggcgagatacaacggctcggtatcagagtttgtaccgccggaagtagagctggcgcttcagcaaaaattcagacaaggatgagggttttgactcatcctttttttgttccgtttgtcagtctgtaagaaaaaatgataatgtacgtaaacagcgcgcatagtgtgacagcaggtccgatctgcacaagcagattccagccatttataaaggccgttggcatgtcactgctgttaagagatttaaatacatactgatatggatcatgccatgccgtgtaaagaggtttccataaaagcatgacgaagacagcggcataaacgccctgcagcaaacgtgcgataaagaatggtttaaatctaatgtcggtttccgataaaatacctgccacctgagcttgtacggaaaagccgctaaacccaagaataaagctgacgataatggctttttgcagaagagaaacatctgtctcgctgacaagcttgctgcctaatgtaatttcaaacatccctgataaaagcggaatgtccaattgagtcggaagctgaaacaaagtcagtgctccttttgtgaaaacagacaaaacatcagtcagctggaccactgacaacagccgattgaagacagaaaataaaataataaagccgcctaccataagaagcgtttgaacagaagacgtcacggcgtcgcctaaaattttacctaagggccgtttttctgcaagtctggcggtatgaagagcgtgtaaagcatctttgactgaagggaaaggtatcgttttctttcttctgagatgctgctcttccttgcggccataggagcgcattgttaaaccgacggcaagattccccaaatagtgtgcagaagctaataaaatgcctagtgatgcgttttgaaagaaaccgacggcaacagcgccgaaaataaagagcgggtttgaagaattggtaaacgacgcgagccgttctgcctctactcttgaaatctgattttcctgccgcagacgggcagtgagttttgcgcccgctgggtttcctgatgccattcccatagcaagaacgaagccgccgacacccggcacgcgaaagatcggccgcataaaaggctcaagcaaaacaccgacaaaccgcacaatgccaaagccgattaagagttcggacagaataaaaaatggcagcaatgacggaaacacaacctcccaccacatagacagcccggttttagaggcttcgaatgaggcctgtggatgtgagatgacagtcgctgttaaaaaaagaaaaaacgaggcaatcaaaagtgtattaatcttcgacaagttcattcttacctccccgatgctaaaaatgcccaatgacatgtatatcatgataaaataatgtatgatgtaaaacggccaagcagtacctgtcctcttgattctttgtactaatatacgagcataggggttcagtttagaccatagaattcggtatacagggaattcaggcaggaggttaacgctttggccaaacctaaaatcgggttagcgttaggatcgggaggggccagagggcttgctcatctcggtgtgctttccagtttacataagcaccaaattgaagtggatatgattgcaggaagcagcatgggcgctttggtgggcagtttttatgccgccggacatgacgtggcaacgatgaaaaaagtagccaaagcctttaaacgaaggctttatgctgattatacggtgccgaagctcggttttttaaaaggtgaccgcgtcagacagcttgtgcatgcttatacattcggaaaaccgattgaagagctccaaatcccgctgggcattgttgcgtgtgatctacagacgggagaaaagattgtgttccgaaaaggatcagtgtcagatgcagtgagggccagcatcagcatcccgggtatctttattccgcagcggctggacggacgccttcttgtagacggcgcggtcgtcgatcgaattccggtttctgttgtgaaagacatgggagctgatattatcatcgcttcggatgtttccagggttcgaaaaactgaaacagcagtgcatatttttgatgtgattatgcaaagtatggatatactgcaaaatgaattagtgcggcatcaaacaattgccgcagatatcatgattcgcccttcccttgaaacatacagctcaagctcgtttgccaatattgaagaaatgatatcggcaggcgaagaggcgacaaaccgaatgatcagcaagataagaaaagaaatagagaattgggagggctcataatttgctacgtaaaaaacattttagctggatgctcgtcatcctcatactgatcgcctttttatcatttataaaacttccatactatattacaaaaccgggagaagcgacagagcttgcttcattgataaaagtggagggaggctacccggaaaaaggaagtctgtccttaatgactgttaaagtgggaccggctaatccgtttacatatgtgtgggcaaagatgcacccttattatgaaattgttcctgatgagagcattaaggaggaaggcgagtcagataaggagtatatgaaaagacagctccaaatgatgaaaagctcgcaagaaaatgcggttatagccgcctatcaaaaggcaggaaaaaaagtcagctattcctttaacggcatatacgcaagctctgttgtagaaaacatgccggcaaaagggaaaatagaagtcggtgataaaatcatcagcgcagacggcaaaaactatcagtctgctgaaaagctgattgattatatcagcagcaaaaaagcgggagataaagtcacgttaaagatcgaaagagaagaaaaagaaaagcgtgtcacccttacgttaaaacaatttcctgatgagccggatcgggcaggaatcggagtttcgctttatacagacagaaacgtgaaggtagagcctgatattgattttgaaatcgaaaatattggcggcccgtcagcagggttaatgatgtcccttgaaatctataatcagctgacaaaaccagacgaaacaaaaggctacgatattgcgggaacaggtaccattgatgttgacggaaaagtaggcccgatcggcggcattgatcaaaaagtcgtcgccgcagacaaagccggaaaagatattttcttcgcgccaaatcaaaacggcgccagcaattccgattataagaacgcagtaaaaacagcaaaagatattgattcaaatatgaagattgtgcctgttgataccatgcaggatgcgattgattatttgaataagctgaaagcgaaaagcacctgattctcaggtgctttttctatacatttaaaaagtgttgttcatcttcgtcatatcgaatcggtgcatgtccgtattcctgtaggtcaaactcagttctcagcggctcttctatcggcaggctgtaaatcctgcttgcttttacgtccagatcgagagctggatgggagaaagaggacagtttgctgacaagcggaacagacagtgcttttttcttttcggataaataagcctgtccttttttcgtcatgccgagaagcctgatatacggcgccttatcgttgtcaagcagcttttgcatatcctgtttttttgttctggttaaaatgtgtgtattcatccgctggagccttgtccacgtatagcgttttgttttcagcagttccataaattcctgataggagctggattttctgatcgaacgaataattctgtgctctaaaccttcctccacctcgtatacttgctgtaattcccgtgccgttacagttgaaaggctgtattttaagtaagaaaagtagctttcaggtgtatgccacaatccgaaagatttgcggtaagctgctaattcacgtgcagatgcagcagggagaaaacgaaggcaggcttcgagattctggccaatcatcgcttttctaatgcttgtggcacttgctatatggttttcgccttcagggagatcggcatcatgatagtccgaagagattcgtgccgtagtataaggtttcataggatatcccccggttagaatcgaggtcacatactggtatcccaaaatgttatttggttttgacaagtcaagtgcactttcagtatgcaaaatggagctgaaggcgatagccgccgctgctgggtaactggccccctttttaagttcttctttaattcggtcattcaatatatgtttatgctcatcaataagctgtgctgtttctaaaaaaggcttgatatccccattttcactcccgaaaaacagcgcctcacattcaagttcgttcaggatggaaacactgccgcgtgcaaaaatgtctgctttttgcacggcataaagataaggcagctcaatgacaagatcaactccgctttgcagcgccatttttgttcgggcccattttgatacaacagcgggctccccgcgctgtaaaaaatgcccgctcatgaccgcgacagccgtgtcacatccggtttgccgctttgctgtttgggcatgataaaggtgaccgttatgaaagggattatattcaaccaccaatccgacagctttcatattttttccgcctttcttgctatgtttaaaaacgtatggtacatttgcaaatgaaaactcttacgccttatttttgttttaagtgtatgcatagcatattccgctgtcaacgatacttcaatggcagcattatgctgtaaagaaaaaatattgacaaaaacaatcttaaaagctataatcatgtttgttgctttcctgaggtgatacaaatgaaatggacgatttatcagctgcatcaaatgccaaaacaaagttttgagtttgatgaaacagttgagttaaatgagctgacaaagctgaattctgacattcgccgcatttctcccgtccgggtgaagggcagagcggatatcaaatccaaacaggtttcgtttgattttacaatttcaggcgaaatgattttgccatgctcaagaacactcgttgatgtcccgtatccatttgaaatttcaacaaaagaactgtttatatttcatcacacggatgatatagaagatgatgacgttcacattgttgaggacgatactatcgacttaactccgatcgtgaaagaagaaattcttttagaaatccctatgcaaatcttttgtgaatctgaacaagaaaaaggagctgctcctcaagaaggaaaggattggcaagtcatttcggaagaagacaagaagaatcaagttgatccgagacttgcagccctcgaaaagctcttaaaacaagatgatgaatcttaactctttaaggaggtgggaataatggctgtaccttttagaagaacttctaaaatgaagaaaagattgcgccgtacacatttcaaacttaatgtacctggtatgacagaatgtccgtcatgcggagagatgaagttgtctcaccgtgtatgcaaagcatgcggatcatacaacggcaaagacataaatgtaaaaagtaactaataagaaaagcgcggggtgaaaagccctgcgctttttctttttctcttcctgtcagcttgcggaaaatttgtgagtgcaaatagtctatctaatctattaccggcatatgtatgagataaataagctgacatggagggagattgaatttgaccattacaagacaagatgcttggactcaggatgaggatttgctgctggcagaagtggtgcttcgtcatattcgagagggaggaacacagctttcagcctttgaggaggttggaagggcgctgaccagaaccgcggcagcctgtggtttcaggtggaactcgtatgtgagaaaacaataccagtcaggtatagagcttgcaaaaaagcaaaggaaagaactgagaaagcaaatcggtgttcattcggtcaatatgccgaattccatgaagcagactgcctcggcatcgtcagaaggaaaacgagatttgtccattcaggatgtcattcaatttctcgaacaattcaaagaagcaccgtctgcacaagaatttcagcttgaaagggaaaaattgaaggagcaaatccaatcgctgcaaaaagagcttgaggatttgcggagtgaaaatcagacattgcggaatcagctagagatgacagaagaggattacaaggcactgatcgatatcatggatcgggccagaaaaatggttgtttcgaaggaagacggaagaatgaaaaaagcggctcaagaaacgtaaagaaacgcctgaaatgaaccggccctatagtaagaataggccggttgttttgatttctatgcagactctcccggtgtcatttcatgatccatatcaggatgccagatgagcgggttttcccctttgtcccgcgccatatcatacttaacagttttaaagttcattttgttccaaaattccgctgatttcattctcggatttgtccggatcggcattttgaatgattttgcaaattcaaccaaggctctcccgtatcccctgttctggtagcccggaagaacctcaagcttccacagctccaaataatcctggcggttgtcaaaatagggattcgatttgccgttaacttgatacagactcattcgtgctacaagtttatcgccaaaataaatcccgtaaaaaggcgaagtgctgtcattttcaataatattatcctgaagttcttcaagcattgaaagctcctgaatgccgtattctttgaatttcttgaattcttccagcgttttatagttgataagcagacgttctacctttgtcaaacaaatctccccctttgttgtttctacatatattgtaaacgctttatttaaaaaatccaaatatttaaactttaattttaagcacatgggatctttgagaagtaatttcttcttacttctgctatgataatacgtaaatgctaaattgggtgtgacatcatgaaaattggaattatcggcggaggctccgtcggtcttttatgcgcctattatttgtcactttatcacgacgtgactgttgtgacgaggcggcaagaacaggcggcggccattcagtctgaaggaatccggctttataaaggcggggaggaattcagggctgattgcagtgcggacacgagtatcaattcggactttgacctgcttgtcgtgacagtgaagcagcatcagcttcaatctgttttttcgtcgcttgaacggatcgggaaaacgaatatattatttttgcaaaacggcatggggcatatccacgacctaaaagactggcacgttggccattccatttatgttggaatcgttgagcacggagctgtaagaaaatcggatacagctgttgatcatacaggcctaggtgcgataaaatggagcgcgttcgacgatgctgaaccagactggctgaacatcttgtttcagcataaccattcggattttccgatttattatgagacggattggtaccgtctgctgacgggcaagctgattgtaaatgcgtgtattaatcctttaactgcgttattgcaggtaaaaaatggagaactgctgacaacgccagcttatctggcttttatgaagctggtatttcaggaggcatgccgcattttaaaacttgaaaacgaagaaaaggcttgggagcgggttcaggccgtttgtgggcaaacgaaagagaatcgttcatccatgctggttgacgtcattggaggccggcagacggaagctgacgccattatcggatacttattgaaggaagcaagtcttcaaggtcttgatgcagtccacctagagtttttatatggcagcatcaaagcattggagcgaaatacaaacaaagtcttttgagctttttcggtaacatgctatactcatttcggatcactaactatttattggagaaaggaagttctagaagatgcagctaactgaactttccatcaaaaatcagaatgtgtttgtacagcactatatagatggcaaagaagaaatgtcttcttttttgattacagtattcatcataaggacatgtggcgcgaaagaatggaagacttatcttcccggtttttcgcaagagaggaattggcggcgtacttaacctcttaccataataaattcggttcaagtgcgatgcagtctgccattgagaagctgaaggacccgtcaagtgccgcagtagtcggcggacagcaggcaggacttttaacaggaccgctttacaccatacataaaattatttcaatcattgttttagcaaagcaacaagaaaaggaactgcaagtgcctgtcataccaatcttctgggtggctggagaagaccacgatttggatgagattaattttgttcacacatctgaagagaatggacctgtgaaaaaaaagctgcctcagtcttattggaagaaatcatcagcagcgagtacatcgcttgatcaggaaaagtgtgccgcgtggatagatgatgtttttgccgcttttgaagaaacagaccatacgaatacacttctcgacaatgtgaaacgatgtttaagggaatctgttacgtttactgacttctttgaactgctgattgcggatttgttccaagaagagggcttagttttattaaattctggagatccggggattaaaaagctggaaacggccatgttccaaaagattcttcgagaaaatgatgaactcgcccgcgctgtatcagatcagcaggccttcatgcgtcaagcaggctacaaaccgattatcgagtccggaaaagagcaggcgaatctgttttatgaatacgaagaagagcgttttttaattgaaaaagacaacggccgatttgtcatcaaagagcttgatctaggatggacgagggatgaacttcatacacatatggaagaacatccagagcgtttcagcaacaatgttgtaacgagaccgttaatgcaggaatttctcattccgactttagcatttattgcagggcctggggaaatcaattattggggcgagctcaaacaggcttttgcggtgatgggcttcaaaatgcctcctgtcatgccaaggctgaacattacgatacttgagcggcatattgagaaaaaactggctgaacggaatatctcattacaagacgcgattgagcgcggaacggagaatcaaagagagacatacttcgagcgccagattccggaagagtttacggcggtgatggatcaggcgaaaagccaaattgaagcgattcacaaaacggtccggcaggaggcgttaaaggttgatcaaagcatggaacctttactcctgaaaaatgccgcttttattcaggatcagcttcaattcttagagcgcacggtgacgaagcgaattgaagaaaaagaaggctacgtcttgaaggattatgaaagaattcaaaatagcattaagccgcttcttgcgccgcaagaacggatttggaatatcatgtattatttgaacaggtacggtccaaaattcttcacgacattcaagaatctgccattttcttttcaaaatcaacatcaagttgtcaaactttgaaataaagttttaaagaaccctgaatagttcagggtttttttttatgggtaaacagtgtaaaatgaagttgtggagcgaagtggtgaatagtggtgagttaaggagagaaagtggggcaagagatcatgtttatgggtgaatatcagcataccatcgatgcgaaaggccgcatgatcgtacccgctaaattcagagaaggcctaggtgagcaatttgtgctgactagaggacttgaccaatgtctcttcggctaccctatgcacgaatggaaacaaattgaagaaaaactaaaagctcttcctctcacaaagaaagatgcccgtgcgtttacccgtttcttcttttcaggggcgactgaatgcgaactggacaagcaaggcagggtaaatatcgcatcatctctattgaattacgccaaactggaaaaagaatgtgttgttatcggggtttctaatcgaattgaattgtggagtaaagtaatttgggaacaatacacagaagagcaagaagattcatttgctgaaattgctgaaaacatgattgggtttgatatataatgattcttcgtgtataacactctaaaagcaatttcaattcatcctgataaaaggtgggaccaacacaatatgtttcaacacaagacagtacttcttcgtgaaaccgtagacggactcaatattaagccggacggtacatatgtagactgcacactcggcggagctgggcacagtacatacttattgcagcagttatccgagaaggggcgtttaatcgcttttgaccaagatgatacggcattacagcatgctaaagaagtgttgtccgactataaaggacagctcattctgattaaaagcaatttcaggtatttaaaagaatgtttgaatgaacaaggcattacagaagtagacggtattttatttgatttaggggtgtcctctccgcagctggatacaccggagcgcggattcagttaccatcatgacgcaccgttggacatgaggatggaccagtcggctacgcttacggcgaaagaagtcgttaatgagtggcgctatgaggatctcgtccgtattttctttaaatacggagaagagaagttcagtaaacagatcgccagaaaaattgaggaggcaagaatgaagtctcctattcaaactacgggccaactggtcgatctaataaaagacgcgattcccgctccagcgagaaggagcggcggacatcccgctaaacgcgtgtttcaggcaatcagaattgccgtaaacgatgaacttagggtgtttgaagaagctttggagcaggcaattgaggttctgaagccagggggcagggtatcagtcattaccttccactcgctagaagacagaatttgcaaaaccacttttaaagaaaagtcgtcgcttccagaacttcctccgggacttcctgttataccggaagagtttgaaccggagctgaagctcatcacacgaaaaccgattacggcaactcaagaagagcttgaagagaacaaccgggctcgttctgccaagcttcggattgctgaaaaaagaaaataacgaaacgcgaacgcaaaattaaaaggaggtcatcagcctatgagcaatttagcttaccaaccagagaaacagcagcggcatgcgatcagtcctgagaaaaaagtgattgtcaagaaaagggcttccattactctcggagaaaaagtgcttcttgtcctctttgctgcggcggtgctcagcgtatcgcttttgatcgtatcgaaggcgtatgcggcatatcaaaccaatattgaggtgcaaaagcttgaggagcaaatttcatccgaaaataagcaaattggtgacctcgaaaaaagcgttgctgatttaagcaaaccgcagcgcattatggacattgcgaaaaagaacggcttgaatttaaaagataaaaaagtgaaaaacatacaggaatgattcaaatgccaaaaaagaataaatttatgaatagaggagcagcgattctaagtatttgtttcgctctctttttctttgtcatcctggggagaatggcatatattcaaataaccggaaaagcgaacggcgaagtgcttgcgacaaaagcgacagagcagcatgaaaagaaacggaccatcgaagcgagccgcggctcgattttagaccgaaaaggaaaagtcattgcagaggacacagcgacgtataaactgattgcgattctcgataaaaaaatgaccactgatgtcaagcatcctcagcatgttgtaaacaaagaaaaaacggcagaagcattgtctaaagtgataaacttggacaaggccgacatccttgatatcttaaataaggaggatgcaaaacaagtcgagtttggctcagctggccgggatattacgtattcgcaaaagcaaaaaatcgaaaagctgaaactcccgggcatttcatttttacgggatacaaaacgctattatccaaacggtgtttttgcatccaatttaatcggctatgccgaggttgatcaagacacaaatgaaatttccggcgcgatggggttagaaaaagtgctggataagtatttgaaggagcgggacggatatgtgacatatgaaagcgacaaatccggctgggagctcccgaacagcaaaaataaaattacagcgccaaaaaatggtgacaatgtatatttaaccattgaccagaaaattcaaacctttttggaagacagcatgacaaaagtggcgcaaaagtataatccgaaaaaaatcatggccgcagttgtcgatccgaaaacaggcaaagtccttgccatgggacagcgaccaagctttgatccgaacaagcgggatgtgacaaactactataatgatttgatttcatatgcgtatgaacccggatcaacgatgaagatatttacactcgctgctgcgatgcaggaaaacgtgtttaatgcgaacgaaaaatataaatcaggtacgtttgaagttggcggggaacctgtcagggaccataatagaggtataggctgggggccgacaacctatcatgacggcgtccttagatcgtcaaatgttgcatttgcgaaactggcgaaagaaaagctgggatatgaccgtcttaatcaatatttacacaaattcaatttttatcaaaaaacaggtattgatttgccaggagaagtctctagcaaaatcaactttaaatatgaatttgataaggcgtcaaccgcatacggacaagcgtctgcagtcacaccaattcagcagcttcaggccgcaacggcaattgcgaatgacggcaaaatgatgaaaccttatgtgattgaccatatcgttgatcccgataaagataaaaccatctatcaaaataagccagaatcagccggaaccccaatttctgcaagcacagcgaaaaaggtgcgggatatattgggagaagttgttacgtcgaaaatcggaacagggcaagcctataaaatcgaaggatttgatgttgccgggaaaacaggtactgcgcaaatagccggtaaaggcggatatctagacggaacagatgactatatcttttcgtttatgggtatggcaccaaaagatgatcctgagcttttaatttatgttgctgtacagcagccgcaactcaaagcaggacaaagcagttcagatccggtatcagaaatcttcaacccgacaatgaaaaacagcctgcactacctgaacattgaaccaactgaaaaatctgactcagataaggaagaaacaaaagcgcagacaatgcctgatttaacagatcaaacggtagctgctgctcaaaagaaagcaaaagaggagaatctcacaccaattgtcatcggcagtgatgtcgctgtaaaagaacagtatccgaaagcggatgaggaagttctcaccaatcaaaaggtcttcctgaaaacgggcggcaaaatcaaaatgcctgatatgacaggctggtcgagaagagaggttctgcagtacggcgagctcgcgggaattcatattgaagtaaacgggcaaggctacgctgtcagccaaagtgctaagaaagacaaagaaatcaaagacaaaaccgtaatcaaggttaagtttaaaaatcctgattaaaaagaaagcttgcgttatgcaggctttctttttttatgccttcagaggagcatcgttctacctgtccaatttcaggcataaaatgaaacaagcctaaataaggagtgaacggtctcttgcgcgtctcgaatgtaacggttagaaaacgtttattatttgttttgctttttggcgtgatcgtgtttctgatcattgatacaaggctggggtatgttcagtttgtgatgggcgaaaaactgacttcgctggcgaaagattcctggagccggaacttgccgtttgagccggagagaggcgagatactggatcggaatggtgtgaagctcgcaacaaacaaaagtgcgccgaccgtattcgtcgtgccgcgccaagttcagaatccgatgaaaacgagcaagcagcttgcggcggtgctcaatatgtcagaagaaaaagtatataaacatgtgacaaaaaaagcgtcaatcgaaaagatcactcctgaagggagaaaaatttcaaatgagaaggcgaaggaaattaaagcgcttgatttaaaaggtgtgtatgttgcggaggacagtatccgtcattacccgttcggcagctttttatctcatgtgcttggatttgcaggaattgacaaccaaggactccttggattggaagcctattacgacgatgatttaaaaggggaaaaaggttctgtcaagttttatacagatgccaagggtaaaaaaatgcctgatgaagcggatgactatacgccgcctaaggatgggcttgatatgaagctgacggttgattcaaaggttcagacgataatggaaagagagcttgataacgctgaggccaaatatcatccggacggcatgattgccgtagccatgaatccgaaaaacggagaaattttggggatgtctagcaggcctgacttcgaccctgctgattaccaatctgttgatccgtccgtctacaaccgaaatctgccagtatggagcacgtatgaaccgggatctacctttaaaattattacacttgcagcagcccttgaagagcaaaaagtaaatttgaaacgggatcaattttatgataaagggcatgcggaagtggacggagcgagactgcggtgctggaaaagaggcgggcacgggctgcagacgtatctggaagttgtgcagaactcctgcaacccggggtttgttgaattaggcgagcgcttaggaaaggaaaagcttttcaaatatatcaaagactttggttttggacaaaaaacggggattgatctccaaggcgagggaacaggcatcttattcccgcttgagagagtaggcccggtggagcaagcaactacggctttcggacagggagtatccgtcacgccgattcagcaggttgcagcagtctccgccgctgtaaacggaggaacgctctacacaccttatattgcaaaggaatggatcgatcctgttacgaagaaaacggtcaaaaaacaatcaccaatcgcaaagaaacaagtcatttctgaggaaacatccaaacaaatccgctatgctctagaaagcgtcgtcgcagaaggaaccggccgcaatgcatttgtagaaggatatcgtgtcggaggaaaaacgggaactgcacaaaaggttaaagatggaaaataccttgaaaacaaccatattgtatcatttatcggtttcgcgccagctgatgatccgagtctagtcgtctacgttgcggtggataacccgaaaggcacgattcaatttgggggaacggttgcagcgcctattgtcggaaatattatgagagacagtctgccggaacttggtgtgaagccccggaaaaatcaaatcgagaaaaaataccaatggaacgacacaaaaacaatagaagttccgaatgttgtagggatgtctgtctcagatcttgagtcactattggtgaatctcaatgtggatgcttccgggaaagggagcaaaatcgttaaacaatcgccagctgccggaacgaaagtaaaagaaggctcaaagatacgcgtgtatttgactgaagaagatgaaaaggaggcagccgattgattcgggctgcctattcttttattgcagaaaaaatgctgatatctttcaagattagctggatgtatccttttatttacgctaaaatatgaactgtatgcttaaaatcattaccacatcatttgatgtgacttcaatgataaaaagaacgaattagaatgttgagaggtttgatacgatgaaacttacaaagctgcttacatacttaacaaccgaaccttctgtaaacgactcacaagaccctgaaataacttcaattgagatggactccagggaagtaaagaaagggagtctttttgtatgtgtaaaagggtatacggtggatggccacgattttgcgcaaaaagcagtagaaaacggtgcagcggctattgtggcagaaagagaggtcgatgtgaatgttcctgttattattgtccggcagtcacttcgcgcgctcagcgttttgtctgatgcgttttacggacagccgacgaagaagcttcagctgattgggataacagggacaaacggcaaaacatcaacgacccacatggtcgatgagattctgaaaaaagcgggaaaacgcacaggcttgatcggtacaatgtacatgaaaatcggagacgaaacacttcctgttaaaaacacgactccggaaagcgtcacgctgcagaaaacgtttaagaaaatgaatgacaagcatgttgacactgcaatcatggaggtttcttcccacgctttgtctttaggacgcgtccatggctgtgattatgatattgccgtgtttacgaatttaacacaggaccatctggactatcataaaacgatggatgagtaccggcatgcaaaaagcttgctcttttcccagcttggcggggctttcaaccatgaacatccaaagcgtgccgtcctgaatgctgacgatgaggcgagcgcttattttgaaaaggtaacagctgcgcatatctctacatacggaattaaaaacgatgctgatgtgatggcgaagaacatcagtatcactgcacagggcacaagctttgatctcgtgacaaacaaaggcacgaagcacatcacgatgtctctcgtcggacaatttaatgtgtataacgtgctggccgctgttgcgacatgtattgcagcaggcataccgtttgaaatcatcactgaagctgttgaagaattgcatggtgtaagaggccgttttgaattggtcaatcagcagcaggagtttccagtcattgtagactacgcgcacacaccggacagccttgaaaatgtgctggagacatgcagagacatgacggaaggaaagctatttgtcgttgtcggctgcggaggagacagagataagacgaagcgcccgaaaatggctaaaattgctgtggagctggctgacgagccgattttcacgtcagataacccgagaagcgaagatcctcgcgcgattttaagagatatggaagccggagtagagaacgcatactatcacagtattgcaaaccgcgagcaggcgatctttttcgcaattgccaatgccaaaaaaggcgacgttgtcctcattgcgggaaaaggacatgaaacctatcagcagatcggaaatgaaactttcgattttgatgatgctgaagtagcggcgagagccattgttgaactcaataagaataagacgaattcataggaaagagatgttactgaataatggagcttgaaaagatttttcatatggaaaaaaatcatgaatatgataactacgtatgtcgtttgaaagaaacaggaggagaaaaggacaatgcttgagcaagtcattctgtttacaattttaatggggtttttaattagtgttctgctctctccgattcttattccgtttttaagaagattaaaattcggccagagtattagagaagaaggaccgaaatcacatcagaaaaaatcagggacaccgacaatgggcggggtcatgatcatactttctatcatagtgacaacaattgttatgacacagaagttttcagaaataagccccgaaatggtgctgcttctgtttgttacgctaggctacggtttgcttggctttttagatgattacatcaaggttgtcatgaagcgcaatcttggattgacatcaaagcaaaagctgatcggacaaattattattgcagttgtattttacgccgtgtatcattactacaattttgcgacggatattcgcattcctggaactgacttatcatttgatcttggctgggcttactttatccttgtgctctttatgcttgtcggcggatcaaacgcagttaacctgactgacggccttgacgggttattgtccggtactgcggcgattgcctttggcgcctttgccattctggcatggaatcagtctcaatatgacgtagcgattttctcagttgccgttgtcggtgcagttctgggcttccttgtatttaatgctcatccggccaaagtttttatgggagatacgggatcgcttgcattgggaggagccatcgttaccattgccattttaacgaaattagagatcctgctggttatcatcggcggtgtattcgttatcgagacattatctgttattttgcaggtcatcagctttaaaacgacaggtaaacgaatctttaaaatgagtccgcttcatcaccattatgagcttgtcggctggtctgaatggagagtagtcgtgacgttttgggctgcgggacttttgcttgccgttttaggaatttacatcgaggtgtggttataagtggaaaatgatcaatttttacagaaacagcattttttaatccttgggcttgcgaaaagcggatatgcggcggcctccattcttcatgaaaaaggcatttatgttgcagtcaatgaccaaaagccttttgaagaaaatgaaccggcacaaaagctttctgaaaaaggaatcgaagttgtttgcggagagcatccagtttctctgttcgatcagcatcaaatcacgattctgatcaaaaacccgggaattccttatgaaaatattatggttcaggaagcggagaaacgaggcattccggtttggacggaaattgagctcgcttactacctgaccagcgccaagtttatcgggattaccggatcgaacggtaaaacgaccacgacaacgctaatttacgaaatgctcaaagctgactcgcaaaaagcactgattgccggaaacatcggcacagtcgcaagtgaggttgcctatcatgctgatggagatgaatggatcgttaccgaactgtcttcgtttcagctgatgggaacacacgctttcagaccggaaatcagcctgattttaaatgtatttgacgcccatctggattatcaccatacgcgcgaaaactatgaaaaagcgaaacagaaagtgtaccttcatcagactgcttcagataaagccattgtcaaccaggatgatgaaaccgtcgtgcgtcttgctgaagccggaaaagccgaaatcgtcccgttttcagtcagcaaaacgcttgaacagggcgcatatgtaaaagacagtatgattatgtttaacggcgaagccattcttcctctggaagaggttgtactgcccggtgctcataacctggagaacattttagcagctattgcagttgtgaaaacggcaggagcatccaatgaggcggttaaaaaggtgctgacaagctttactggtgtgaagcaccgcctccaatatgtcacaactgtgaatggccgcaaattttataacgacagtaaagcaacaaacattctggcgacaagcaaggcgctttcagcttttgacaagccggtcattctgcttgcgggcggactggatcgcggaaatggttttgatgacttgaaaccttatatgaagcatgtcaaagcagtgcttacatttggccagacggcgccaaaactcgagaaactcggcaatgaactgggaatacaacatgtcaaacgtgtcgataatgttgaacaagcagtatctgcggcgtttgcgctctcaaatgaaggagatgtcatcctgctgtcacccgcgtgtgcgagctgggatcaattcaaaacatttgaagaacgcggtgacatgtttatagatgccgtgcatatgcttaagtaagggcttgtcttgaagtaaatcggcagccctaatgactttaagcttggggtgtcgattgctttgactactaaaaaaacatcgcctgatttgttattggtcatcattacgttattattattaacaatcggattaattatggtgtacagtgcgagtgcggtatgggcggattataaatttgacgactcattctttttcgcgaaacggcagcttttgtttgcgggaatcggcgtcattgctatgttttttatcatgaatgtcgattattggacttggaggacatggtccaaattgctgatggttatctgctttttccttctggtgcttgttttgataccgggcgtcggaatggtgcggaacggttcaagaagctggatcggagtcggagcattcagcatacagccttcagagtttatgaagcttgcgatgattgcattccttgctaaatttctctctgaaaaacaaaaaaacatcacatcgttcagacgggggttcgtccctgcacttggcatcgtgttttcagcatttttgattatcatgtgccagcctgacctcggaacggggacagtaatggtcggaacttgtattgtcatgatttttgtagccggcgcgcggatcgcccatttcgtctttctcggactgatcggcctcagcggatttgtcgggctcgtactatcagctccatatcggattaagcggattacctcatacttaaatccatgggaagacccgctcggaagcggatttcagatcattcaatcgctttatgcagtggggcccggtgggttgttcggaatggggctcggacaaagcagacagaagttcttttatctgcctgagccgcaaacagactttattttcgccatcttgtcagaggagctgggctttatcgggggaacacttattttgctcctcttcagtgtcctgctgtggagaggaatcagaattgcgcttggtgcgcctgatctgtacggaagctttgtcgcagtcggcattatttcaatgattgccattcaagtcatgatcaatatcggcgtagtcacgggcctgattcctgtaacaggcatcacgctcccgtttctgagctacggaggctcttcattgactctaatgctgatggcagttggtgtgctgctgaatgtaagccgctactcgaggtattaacgaatgtatgtccatgcttcctgtctaacatgaagcttggaaacaattgatgcgataaccctgtccaacaaaacagggttatcgttatgttatagagaaacttagactgggggaaaagaaatgcgaattgcaataagcggaggcggtacagggggacatatttatcctgcgcttgcttttattaaagaagtgcaaagacgtcatcctaatgtggaatttttatatatcggaacagaaaacgggctggagaaaaaaattgttgagcgggagaatataccgtttcgttcaattgaaattacaggatttaaaagaaaattgtcatttgaaaatgtcaagactgtgatgcgttttctgaagggcgtcaaaaagagtaaatcgtatttagcggaatttaagcccgatgccgtaattggaacgggcggttatgtatgcgggccggttgtctatgccgctgcgaaaatgggaattccgactattgtccatgaacaaaacagcctgccgggcatcacgaataagtttctttcaaaatatgttaataaagtagcgatttgttttgaagaagcgaaatcacattttcctagcgagaaagttgtatttacgggaaacccgagagcctctgaagtcgtctcaataaagacgggacgatcaatggctgaatttgggctttctgaagacaaaaaaacggtcttaattttcggcggaagccgaggcgctgcaccgattaaccgcgctgtcattgacatgcaggatgcgctgaaaacaagagactatcaagtgctgtatatcaccggtgaagttcactatgaaaaagtaatgaatgagctgaaaagcaagggtgccgctgataatatggtcacaaagccgtttcttcatcaaatgcctgagtatttaaaggccattgatgtcattgtggccagagccggtgcgacaacgattgccgaaattactgctctcggaatcccaagtgttctgatcccaagtccatatgtgacagcgaatcaccaggaggtcaatgcgagatctcttggccagcataatgcggcgattgtactgaaagaaacagagctcagcggggagaagctgattgaagcgctagaccggattgtactgaatgagcaaacgttaaaggaaatgagcgaacgaacaaagtcactcggtgttcctgacgcggctgcccgtttatacagcgtactcgaggaattaaaaaaatagtagaaaagcaaatggaatgcggaggtttacgatggagaaagtgatacaggaattaaaagaacgcgaagtcggcaaggttcttgcaaatgaaccgctcgcgaatcatacaacgatgaaaatcggcggacctgcggatgtattggtcattccaagcagtatagatgctgttaaagacatcatggacgtgattaaaaaatatgatgtgaagtggacagtcatcggccgcggatcaaatcttcttgttttagatgaaggaattagaggcgtagtgatcaagctgggggcgggtcttgaccatttggagcttgaaggggaacaagtaacagtcggaggcggttattcagtggtccgccttgctacatcattgagcaaaaaaggcctgtccggtttggaatttgctgccggcattccaggatcagtcggcggagcggtttatatgaatgccggcgctcacggttctgatatgagcgagatcctcgtcaaagcgcatattttgtttgaagacggaacgattgagtggctgacaaatgagcagatggatttcagctacaggacatctgtactgcaaaagaaacgcccgggcgtttgccttgaagctgttttgcagctggagcagaaggataaggaatcaatcgttcagcaaatgcaaagcaataaagactatagaaaaaatacacagccgtattcaagcccttgtgcgggaagcatattcagaaatccgcttccgaatcatgccgggaaccttgtagaaaaagcaggcttgaaaggatatcaaatcggcggtgcaaagatatcggagatgcacggaaacttcatcgtcaatgcgggaggagcatcagcaaaagatgtgcttgatctcattgaccatgtgaaaaagacaatccgtgaaaaatacgagattgatatgcacacagaggttgaaatcatcggcggaaatcgctgattcaagttctgactgaagctgttcatatgatatactgtaagcaaacgacaaacggcatcatagtatgccgtttgttttggaatagacagacttttaacagctgtttcatttgaatgaggtgaacaggcaatgaacccgggtcaagaccgagaaaaaatcgttaacattgaagagcggatccctaaaattaaagagcagaggaaacaaaaggcaaaccgccgtctcatttcatttattatgctcttttttattatggtgctgatcattgtgtacctgcaaacaccaatcagtaaagtatcaacaatctctgttacagggaatgaaaatgtatcaaaaaaggaaattatcgacctttccgatattaacagcggagatactgagttttggagtttggacaagcaaaaaacagaaaagaagattcagcaaaataaattagtgaaaaaagcggagatcagcaaatcgcttcctaataaaatcaacattgcaatcgaagaatataaagcgattgcttatttagaaaaagacgatgtgtactatgaagtgcttgaaaacggctcagttctgccaaacgaagtaacgccggatgatgccggaccgattttagtgaattggacaaacgcgaagaagcggtctcaaatggccaagcagctcgatgcgttgtcaaattcgttaaaacagtcgatttcagagatttattatacgcctgtaaaaatggatgaaaaccgtattaagttgtacatgaacgacggttatgttgtcactgcatctattaaaacgtttgcagaccgaatgaagacgtatccttctatcatttctcagctaagcagcaataaaaaaggaatcattcatttagaagttgccacctattttgaagagtttgggaaaaacgataaggctgctaaaaaggaagatgaaaattgaggggcaaatcagcagtccttctttccttgattatgcttatcgcaggctttttgatttcattttcttttcaaatgacaaaagaaaacaacaaaagcgcggctgagacggaagagtggaaaaaagaatatgcgctgagagatgaacttctgaaacaagagaaagaaaataagaagcttgaaaaagaattatatcaaaagcaaaacaaagtccgccaggcggaaaataagctgaagaaagagaagtcggaatactataatgtcctcgaagatacagaaaaatacaggatgtatattggggaagtcggtgtgcagggagaaggcgttgaggtgacattggaagatgcgtcatacataccggaaggggagaatgtgaatagttacatcgttcacgaaagccatatcttccaagtagtaaacgaaatgtatatctcaggagcggcagctgtcgccgttaatggacagcgtttgacgcatgattcgtatatcaaatgcaatggtcctgtggtaacggtagacggggtgcagcatcccgctccatttacggtatccgctattggagatccagatgtcctgctgccctcgttaaatatcgctggaggcctaattgatcagctgtcaatggatcatatttctgtgtcggcagaaaaagagaaaaacgtacaaatgaaaccgattctgaaaacgaaggaatgactgaaaaagcgggtgaaatagattgaaaataaagcgttccttcataagcatcagtgtgcttatggtcatcttcggcctgatgatatctgttcagtttaattcgttaaagcaccccaaagtccgggatacaagagatatgtgggatattagggaagagctgacatcagagcagaagaagcaggaaaagctgctgtctgaaataaacaaatatgacaaacttctgaatagctattcgcaaacgaaagaaatgacaaaagaaaccgcgctaaataataccttgcaatccttaaaaaaaacagccggcatgaccgatataacaggtagcggaattgtcattacgatttccccgcttttttctgaaagcttaacaggagagccggtcgaaaatccgcctccggatttgctgaaaaagctgattaatgaactcaactcctacggtgcagagcatatctcgattaacgagcgaagagttgtgaatcatacagttatcagagatataaacggcactacaaaaatagacggatacgcccttgacgattatcctttaacagtaaaagtgcttgccaaagatccggacatgttacacagcggagtgaaggggtcaggccttgaggatctttttgcatctgaaaatttagcattaaaagccggtaaatctgaaagcaaactaacattaaaagcatatgacagaccactggacgtacaacagctgaaactgcttaaagactgaaaaggaggagaattgtcatgtggctgcccgtgttgggactggtgctcggaatagcgattggactaatgacaaacttaacgataccgagtgaatactcaaactatttatcgcttgcggtgcttgccgcacttgatacattaatcggcggaatcagagcgcatttacaaggtacatatgatgaaatggtatttgtttccggtttcttttttaatattatattggcaataagtttagcttttctgggagtccatcttggtgtagacttgtatttagcaggtatattcgcatttggagtcagattatttcagaatatagccgttatcagaagaaatctactaacaaagtggactctttctaaaaaaaataaaaaaaatgtgatataaaagaggatatacataggatataacgaatattttcaataaacataaaatgtgaaaagcacataaaaatattctgttgttattttttgttacacacttgtaaagccacattcattgtattgttgttccgcaaataatagaatagaaatgatcgaaatgtgaggaggtgccatagaatgaacaacaatgaactttacgtcagtcttgacatcggtacgtccaatacaaaagtgatcgtcggagaaatgacagatgattcccttaatattatcggtgtgggaaatgtaccgtctgaagggttgaaaaaaggctcaatcgttgatatagatgagaccgttcattctataagaaaagcgtttgaccaagctgaaagaatggtaggttttccgcttagaaaagctattgtcggcgttaatggaaattatatcaatattcaagatacaaacggtgttgtagcagtttccagtgaaaataaagaaattcaggttgaagatgtacgccgtgtcatggaggcggcacaggttgtttcagtaccgcacgaacagctgattgttgacgtcattcctaaacagtttatcgtagatggaagagatgaaatcaccgacccgaaaaaaatgctgggtgtgcgtttagaagtagagggcaccttgatcaccggttcaaaaacaatcttacataacttactccgctgcgttgaaagagctggtattgaaataactgatatttgccttcagccgctggcagccggttctgctgcattatcaaaggacgagaaaaaccttggtgtggctctcattgatatagggggagggtcaacaaccattgccgtattccagaacggacatctcacttctacccgtgtcattcctctcggaggcgaaaatatcaccaaagatatctccatcggattgagaacgtcaacagaagaagcagaacgcgtgaaaaagcaatttggacatgcctactatgacgaagcctcggaagatgaaatatttgaggtaaccgttataggcaccaatcaaaaacaaacatttacacagcaagaagcagcgaatatcattgaagcgagagtagaagaaattcttgaaattgtttcagaagagcttcgcagtatgggaattaccgatctgccgggaggcttcgtgctgacaggaggacaagcagctatgccgggtgtcatgtctttggcgcaggatgtgctgcaaaacaatgtcagagtggcaagcccgaattatatcggtgtaagagatcctcaatatatgacgggagtgggcctgatccaattcgcctgccggaatgcaagaatccaaggcagaaaaataggctttaagatgcctgaagaagcgatacaggaaatcgcagtctcatcatctgaggaacaagagcagcatcatcaccaaaatgaggtgcagcagcggccaaaaggaaaacaaaaaacacaagccgaacataataaacagagcaaaatgaaaaaactattaagcatgttttgggaatagatagatagtcattcggcagattaggaggatttagcatgttggagttcgaaacaaacatagacggcttagcatcaattaaagtaatcggagtaggaggcggtggtaacaacgccgttaaccgaatgattgaaaatgaagtgcaaggagtagagtatatcgcggtaaacacggacgctcaagctcttaacctgtcaaaagcagaagtgaaaatgcaaatcggcgcaaagctgactagaggattgggagcaggtgcgaatccggaagttgggaaaaaagccgctgaagaaagcaaagagcagattgaagaagcacttaaaggtgctgacatggtattcgtgacagctggtatgggcggcggaacaggaacaggtgccgcaccggttatcgcacaaatcgcgaaagacttaggcgcattaactgtcggcgttgtgacaagaccgtttaccttcgaaggacgcaaaagacagcttcaggctgcaggcggaatctcggcaatgaaagaagcggtggatacactgatcgtgatcccgaacgaccgtatccttgaaattgttgataaaaacacaccgatgcttgaagcattccgtgaagcggataacgtacttcgccaaggggttcaaggtatttctgacttgattgctacacctggtcttatcaaccttgactttgctgatgtgaaaacaatcatgtcaaacaaaggatctgctttgatgggtatcggtattgctactggggaaaatcgcgcggcagaggcagcaaaaaaagcaatttccagcccgcttcttgaagcggccattgacggtgcgcaaggtgtcctcatgaacatcactgggggaactaacctcagcctatatgaggttcaggaagcagcagacattgtcgcttcggcatctgatcaagacgtaaacatgattttcggttctgttattaatgaaaatctaaaagatgagattgtggtgacagtgattgcaaccggctttatcgaacaagagaaggacgtgacgaagcctcagcgtccaagcttaaatcaaagcatcaaaacacacaaccaaagtgttccgaagcgtgagccaaaacgtgaggagcctcagcagcagaatacagtaagccgtcatacttcacagccggctgatgatacgcttgacatcccgacattcttaagaaaccgtaataaacgcggctaatgtaaaggacaaaatcgttttcgattttgtccttttttgtttttctcttcacactttccttcttataaagtctttttccctattgcttccttcgcttagtaacaaaacagataattagacctatttatttttgtgacatttctatcattttcatatatatggaaattgaatgacatgaaacgacaatatctgtaattcagattgtctacagttaatatacagcgatgttctgacaaaccattcattattaaaaggagggacgacactttttttaaaaagcatgttgaaaaagggggatgaaaatgaagaaaaaaacgaaaaacagactcatcagctctgttttaagtacagttgtcatcagttcactgctgtttccgggagcagccggggcaagcagtaaagtcacctcaccttctgttaaaaaggagcttcaatctgcggaatccattcaaaacaagatttcgagttcattaaagaaaagctttaaaaagaaagaaaaaacgacttttctgattaaatttaaagatcaggctaacacagaaaaagcggcaaaagcggctgttaaaaaagcgaaatcgaagaagctgtctgccgctaagacggaatatcaaaagcgttctgctgttgtgtcatctttaaaagtcacagccgatgaatcccagcaagatgtcctaaaatatttgaacgcccagaaagataaaggaaatgcagaccaaattcattcttattatgtggtgaacgggattgctgttcatgcctcaaaagaggttatggaaaaagtggcgcagtttcccgaagtggaaaaggtgcttcctaatgagaaacggcagctttttaagtcatcctccccatttaatatgaaaaaagcacagaaagctattaaagcaactgacggtgtggaatggaatgtagaccaaatcgatgctccaaaagcttgggcacttggatatgatggaactggcacggttgttgcgtccattgataccggggtggaatggaatcatccggcattaaaagagaaatatcgcggatataatccggaaaatcctaatgagcctgaaaatgaaatgaactggtatgatgccgtagcaggcgaggcaagcccttatgatgatttggctcatggaacccatgtgacaggcacgatggtgggctctgaacctgatggaacaaatcaaatcggtgtagcgcctggcgcaaaatggattgctgttaaagcgttctctgaagatggcggcactgatgctgacattttggaagctggtgaatgggttttagcaccaaaggacgcggaaggaaatccccacccggaaatggctcctgatgttgtcaataactcatggggagggggctctggacttgatgaatggtacagagacatggtcaacgcctggcgtgcggccgatattttccctgagttttcagcggggaatacggatctctttattcccggcgggcctggttctatcgcaaatccggcaaactatccagaatcgtttgcaactggagcgactgatatcaataaaaagctcgctgacttttctcttcaagggccatctccatatgatgagataaagccggaaatatctgcaccgggcgttaatattcgttcatccgttcccggtcagacatatgaggatggttgggacggcacatcaatggcagggccgcatgtatccgctgttgctgcactgctgaaacaggcgaatgcctcactttctgttgatgagatggaggatatattaaccagcacggctgaaccgctcacggattcaacatttcctgattcaccgaataacggatatggccatggtctggtgaatgcttttgatgctgtatccgctgttacagatggtttagggaaagcggaaggacaagtttctgtagagggggatgaccaagagcctcctgtctatcagcatgagaaagtaactgaagcttatgaaggtggtagcctgccactgactttgacagctgaagacaatgtgagtgtgacatctgtaaagctgtcctacaagcttgatcaaggtgaatggacagaaataacggctaaacgaatcagcggtgatcatctaaaaggaacgtatcaggcagagatcccagatataaaaggaactaaactaagctataagtggatgattcacgattttggcggtcatgtcgtttcgtctgacgtatacgatgtaacagtgaaaccaagcatcacggcgggatataagcaggactttgaaactgcacccggcggctgggttgcgagcggaacaaataataactgggaatggggagttccgtcaactggcccaaatacagcagcatccggagaaaaagtatatggaacgaatttgacaggaaattatgccaactcagcaaacatgaaccttgttatgcctcctattaaagcacctgattcaggaagtctgttccttcaatttaaaagctggcacaatttagaggatgattttgattacggctacgtttttgttcttccggaaggtgaaaagaattgggagcaggctggtgtctataacggaaagacatcaagctggacggacgaagaaattgatttatcggcttataaaggccaaaacattcaagtgatgtttaaccttcaatctgatgaaagcattgcaaaagagggctggtatattgatgatgtagtgctttctgacaaatcagccggaaaaacagtcaaaaagaataagctgggcgtcgaaaagccgtctggaaagcaaaagaaaaagccagtaaatccgaaaaaggctaagccatctgcaaacacagcggtaaaacatcagaacaaggctatacagcctcaagttttgccgctcagggcacaagtcagtgtagtggaaacaggaaaatcaacatattcagatcaatccacagggcagtacacgctgaagcacaaagcgggagactatacgcttatggcagaagcatatggttatcagtcgaaaacacaaaaagtatctttaaagacggatcagacgacacaagctaattttacgttagaagagatgaagaagggcacattaaaaggcatggtcatcaataaaacgacaggagagccggtaacaggcgcttccgtttatgttgtagaggatgctgctgtggaaccggctatgacaaacgacaaaggtgaatatacgctggaggcctatgaaggcgcttatacgattaaagtcgctgcaccgggttattacagtgatgaattttccgttgagttaaaaggtgatgttacaaaagaaactgcattgaagcctttcgtcggttatccgggtgaaattgcatatgatgacggaacagcggagaatgccaattcctattttgctgccggtaacggatgggcggtaaaaatgacgctcgctgacggcaaggacaaaggcatgcttacaggagggctgttcagattctgggatacagagttcccagatccgggcggcacagagtttaaggttgaggtatacgatgccacaggaaaagacggagcaccgggcaagaaaattgcagggccatttaacgctgaagctcttcgcaatggcgagtggactaaggtagatctcagttcaaaagggattatggtcgatagagacttttatctcgtatatatccagtcaaaacctgacccgtattcacctggactggcaatggatgaaaccggcaagaattccggccgcaactggcagtatataggtggacaatgggagccgggtgacgaagcagacggcaactatatgattcgcgcattagttaattatgaagctgctgtacctgagattacttcaccgacagacaaatcatacacaaataaggatagcgtcactgtaaaaggaaacgcttctcctggcacaacggtacacatttataatggagagaaagaagcaggagaaacgaaagctgctgcggatggcacgttccatgcaggcatcatactcaacaagggtgaaaatgagctgacggcaactgcatcaactgacaacggaacaacagatgcctccagcccaatcacggtcacgcttgatcaagaaaagcctgaattaacactggacaatccaaaggatggcgggaaaacaaataaagaaacgctgactgtcaaaggggctgtatccgatgacaatctgaaagacgtcaaggtgaatggcaaaaaagcaacagtagctgatggttcatactcagcccgtattcttttggaaaatggaagaaatgaaatcaaggtaattgctacagacttggcaggcaacaaaacgacgaaaaagacagtcattgatgtgaactttgacaagcctgtcatttccggcttaattccgggagaggataaaaacttaaaagccggtgaatctgtgaaaatcgctttctcaagcgctgaggatttagatgcaacgtttaccattcgtatgccgctgacgaatgcaagagcgagtgtgcaaaatgccaccgaactcccgttaagagaaatctctccggggagatatgaaggctattggactgccacttcttctattaaagcaaaaggagcaaaagtagaagtgatcgtccgagatgattatggaaatgaaacaagaaaaactgcgaatggaaaacttaatatcaacacagaaaattaagtggaaaaaagctgccgtcattggcagtttttttatatcctctcattatacttcctcgacaaattaagcagatttccctgaaaaattgtattttcctctcaacattaattgacagactttcccacagagcttgctttatacttatgaagcaagaaggggaacagcgtgaggcaagaaagaaaggagtcagatgtgaaaatctatttagatgtcatttggctgttaaacttttgttttgatgcacttttgcttttgctcacggcatttattttaaaacggcatgtaaaaaaaagaagactggtaggcggagcgttcatcggttccagtattgtccttttgatgtttactcctttttcgccgattgttgaacatccggctgggaagctagctttttcagttgtgattgtggtggtgacatttggctttaaaagatttcggtttttctttcaaaatttgttttccttttattttgccacttttttaatggggggaggaattatcggagcccattctttgctgcagtcaaattctattgttcaaaacggtgttatgattaccaatcaaacagggtttggagacccgatcagctggttgtttattgttggtggctttccagcattatggtttttttctaaaagaagaattgaagatattgaaacaaaaaacattcaatatgaggaacgagtcagcgtgcaggcagatttgggcagccaaacacttcatgtcagaggcctgattgattccggtaatcagctgtacgatcctcttacaaaaacaccggtaatgatcatttacattgataaattggagccgattttcggaacagccgaaacgatgatcattcgaaacacagacccattggaagccatcgaacagctcgatgattcctttcgctttttagataaaatgaggttgattccatacaggggagttggtcagcaaaatcaatttttattatgcgttaaaccggatcacgtaacgattatgacaaaagaagaaatgatttctgcagataaatgtttaatcggcatcagcacaacaaagctgtcggcagatggagagtttgacgcgattattcatccgaaaatgctttcgggcaaggctgtcaaacacgtttcataatgttcgcaaatgtccgttacttatcatactcaaacggcgtgacatttagaagggagaggaagatgaaaaaactgaaattacggttgacgcacctctggtataagctgctgatgaaacttgggctgaaaagtgatgaagtctattacataggcgggagtgaagccctgccgcctccattatctaaagatgaggagcaggttttgttaatgaagctcccaaacggcgatcaggcggcgcgcgccattctaattgaacgcaatttgcgtctggtcgtatatatcgcccgtaaatttgaaaatacgggaattaatatagaggatttaatcagcatcggtaccatcggtctaatcaaagctgtgaatacattcaatccagaaaagaaaatcaagcttgctacctatgcctcccggtgtatagaaaatgaaatcctgatgtatttaagaagaaataacaaaatccgttcagaggtttcctttgatgaaccgcttaatattgattgggacggcaatgagcttttgctttctgatgtgctcggcactgacgatgacatcatcactaaagacatagaagctaacgtcgataaaaagcttttgaaaaaggcgcttgaacagcttaatgagagagaaaagcaaatcatggagctgcggtttgggcttgtcggtgaagaagaaaaaacccaaaaggatgtagcggatatgatggggatttctcagtcttatatttcgcggcttgagaaaagaattataaaaagattgagaaaagagttcaacaaaatggtgtaaaaaattttatggttagaaccccttgattttacagggatttcctgatttcgacagtttttcggtctgagtgcagtgcatatttttcccacccaaggagatacttaacgttgtacagcagctcctgtagggagggaaaaaagtgtcgagaaataaagtcgaaatctgcggggtggatacctccaaattaccagtactcaagaatgaagagatgagaaagctgtttaggcagctgcaggatgaaggcgatgattcagcaagagaaaagcttgtaaacgggaacttgcgtcttgtcttaagtgtcattcaacgatttaataacagaggggagtatgttgatgacttatttcaagtcggctgcatcggactaatgaaatccattgataattttgacctaagccacaatgttaagttttcaacatacgctgtacctatgattatcggagagatccgcaggtatttacgcgataataacccgatccgtgtctcaagatcactccgggacatcgcttacaaggcgcttcaggtaagagagcggttaatcagtgagacaagcaaggagccgactgcagaagacatcgcaaaagttcttgaagtaccgcatgaggaaattgtatttgcgcttgatgccatccaggatccggtttctctatttgaaccgatctataacgacggcggagacccgatctatgtgatggaccaaatcagtgatgagcgtaatacagattcacaatggattgaagagctggctttaaaagagggcatgagaaggctgaacgatagggaaaaaatgattttgagaaagcgattcttccaagggaaaacccaaatggaagtcgccgaggaaatcggaatttctcaagcgcaggtgtccagacttgaaaaagcggctatcaaacaaatgaataaaaatattcatcaataatgaaaagcctttaaaacgatgttgttttaaaggcttttctattgattatggatggtttacgttttggaaaaagtaaggtatcctagttcgtacaaagttttatgaaaattaaaacaattataaaaggcaataaagaggaggaccacgatgattttgcagcttgacaatgtctcactaaaacggaatgggaaatggatactgagagatattgattggaaggtggaagaaaaggaaaattgggtgctttacggcctaaatggcgccgggaagacagcgctgttaaatatgctttgctcatattattttccaacatcaggcgagatgcaggtgcttggccatgaatttggcaaaacagagcttggggaaaagctcagacgtaaaattggcctcgtctcagctgctcttcagcaaaaattgtacccggcagattcagcctttgaaattactttgagcggagcttacgcttcgattggtttatatgaaacgccaagtaaggaaaccagggaaaaagcgattggtttgttagaggacttgggagcaattgaatatgccgatcgccgctatgaaaccctttctcaaggggaaaaacaaagagcgttgattgctagagcactaatggccgatccggagttgctgatactggatgaaccagtcacagggctggattttattgcccgggaaaagctgttagatacgattacatacattgcaaacaaagaaaatgcaccatctatcctttatgtgactcatcatgctgaagaaattttgcctgtctttgataaagcccttttattaaaacagggagaggtctttggatccggagaaataaaggaaatgcttactgatcaaatactttccgctttttttgataccccaatccatgtattatggaatcaggatcggccgtttttaacaagagctgagccgataacgaatgcctgacaaacatatatagattcatcctaggggtgctttgcgaagctgagagagactttgtctcaacccttttgacctgatctggatcatgccagcggagggaagcggtgaaaagcggagtacatcggactccgtttgtttttattaagccgtttcatcacatttgaaacggcttttttgattttaaagaataggagcggatttacattggatcaacaaatagactctttgcaaaaaaaagtggaagaacataaggaggagcttattcagcttgcgaaaacgctgatttcttatcaaacacctgctccgcctgcaagaaatacagagggcattcagtcatggattgcgggatatttaaatgaattgggattctcgatcgacaaatgggatgtgtaccctggagatcccaatgttgtagggaagctaaaaggaacagattcagcagattattatagcctgattatcaatggccatgtagatgtggcagaggtaaaagaggatgaagaatgggagcatgatccatttcatccaattgaaaaaaacggtctcttaatcggtcgaggcgcttccgatatgaagggcggaatggcgtgtgtgttgtttgctgtcaaattaattcgtgaagccggcattgagcttccaggtgatctgattctgcaatcggttattggggaggaagttggagaggccggcacacttgaatgctgcaagaggggctaccacgctgattttgcaattgtcgcggatacgagcgatatgcatattcaaggccaaggcggtgtcattacaggctggatcgaaatcaaaagcagtcaaacatttcatgatggaacgagacggaatatgattcacgcaggcggaggaacattcggagcaagcgcaattgaaaaaatggcgaaaatcattgcggggctcggtgaacttgagcgccactggtccattatgaaaagttatcccggttttaaaccaggcacaaatacgattaatccggcagttatagaaggcggcagacatgcggcttttatagcggacgaatgccggctgtggatcacagtccatttttatccaaatgaaacccatgaccaagtggcagcggaaatagaagattacgtcaatcggctgagtgacagtgatatttggcttagggaaaaccgccctgtattcaagtggggaggctcatctatgatagaagacagaggagaaatttttccggcattggaagttgactctggccacccaggcgtcttagcgctaactgcctctcatcagaaagtgaaacgggagtgtccaattattgacgtttctcaatcagttacagatggcggatggctgtatgatgccggtattccatgcgtaatatacggtcctggagatctgcacaatgcacactctgtgaacgagaaggtatcgattgagcagctagtagagtatacaaaaattatactcgattttatcatcagctggtgcagccggaaaaaagaacaatgacatgaaaatttcttcttgctgacaaggttcagcctgcccgttcatatacttgaacaaaaggacggaaaaaggacgtgatggaatgatcagcatttcagaatttcaggtaaaggatgtcgtcaatgtctcaaacggaaaaaagctggggagtattggtgatattgatatcaatgtgaccactggaaaaattcaggcgatcatactcggaggaaatgggaaagttctcggattttttggaaaagaagaggaattggtcattccatggcgaaatatagtaaaaatcggggaagatgtaatcttagtccgattaagtgaaccacatgcataaacctgcttgtctgccgcagattggcaaatgccggaagtctcgattcttccggcacatttcatttagaaatatgcaaatcggcgctcaacgaatgcagtaagatgtggtaaaataagtgggaaattccgcttttttaaatgtttgtcgaaaggttggatcatcatgaatacatatcacccattcagtcttaccacaccctcgacactcatgatacaagactgggttcaaacgaatcaaaacaacaaaaaagtcattgccggatttacgacaaaaaacggcggtgtcagccaaaagccttttgaatcgttaaatacaggattgcacgttcatgacaaagatgcagatgtagttaaaaatcgtgaatatattgccgatatgtttaatactgatttgcagtcttgggtattcgctgatcagacacatgataatcgcgttcagaaagtgacgcagagggataggggaaaaggcgcccgtgagtatcacacggctctaaaagcaacggacgggctatatacaaatgaaaaaaatgtatttttagcattatgctttgctgattgtgtgcctcttttcttttatgatccggttaagtcgcttgtcggagtcgcccatgccgggtggaaaggcaccgtcaaacagattggcagagaaatggtgaagcaatggactgagaaggaaggttcaaatccctcagatatttacgctgttattggcccgtctatcagcggagcatgctatacggtagacgaccgcgtcatggatgctgtccgcgcattgccggtttcagcagaccttgccgttaatcagacggcaaaggcacaatatcagcttgatctgaaagagctgaaccgtcttatactgatggacagcggtttggcaagtgaacaaatttctgtcagcggtttatgcacggaaagcgagccgtctcttttctattctcaccgccgcgatcaggggaaaactggacggatgatgtcctttatcggaatgaaggaggcataaaagatcttgcgtgttgttgataatttacgacatataaacgaacgaataaacgaagcatgtaacagatcgggccgcagctccgacgaagttacggttattgcagtcacaaaatatgtatcacctgaaagagcacaggaggcagtagatgctggcatcacctgcctcggagagaatcgggatgcggaactgctccgcaaacaggaattgatgaaagggaatccggaatggcattttatcggcagtctgcaatcaagaaaagcaaaatctgtcgtcaatgcggtttcctatatccattccctagaccggctctcattagcgaaagaaattgaaaaacgggctgaaggtactgtacgatgctttgtgcaggtcaatacctctcttgagccttctaaacatggcatgaaaaaagaagaagtcattccattcatacaggagctttccggtttcgaacatatccttgttgccggactgatgacaatggctccgctgactgatgatcaagatcagatcagaagctgtttcaggtcgctgagagaactccgtgaccaggttcagaagctgaaccagccgaacgctccgtgtactgaactgtcgatgggcatgtcaaatgattttgaaattgcaattgaagaaggagctacttatattagaatcggctcatcgttagtcggaaatgaaacagggggtgtacagcaatgagtatgaaaaataaactgaaaaactttttctcaatggaagatgaagaatacgaatatgaatatattgagacagagcgggaatctcatgaggagcatgagcaaaaagaaaagccggcttatacggggaataaaccttcgggcaaacagaatgtagtgagcttgcaaagtgttcagaaatcctctaaagtggtgttgagtgagccgcgcgtttatgcggaggcgcaggaaatagccgaccatttgaagaaccggcgggcagttgtcgtcaatcttcagcggatacagcatgaccaggcgaagcggattgttgactttttaagcggaaccgtttatgccattggcggcgatattcaaagaatcggctcagatattttcctctgcacgcctgacaacgtagatgtatcaggcacaatttctgagctcatatctgaagacgaacatcagaggtggtaaagcgagatgatcctttatcaagttttttcggttttaagcttattaatcacaatatactcatttgccctgatcatatatatttttatgtcatgggtgccgagtacgagggaaacagcagtcggacgttttttagcttcgatttgtgaaccatatctcgaaccattcagaaaaatcatccctccgattgcaatgctggatatttcaccaatcgtagcaatacttgtgcttcggtttgcgacaaccggcttgtggggactttatcgcatgattgcgttttaatgtgacagtttgataggggcttggcagcagccaagcctctttacatagaagggaaagacgatgagcgatatatatcagcacttcagaaaagacgagcgggcctttattgatcaggcgctcgaatggaaaagaattgtccaggagcagtaccggatgaagctgaccgactttttagatccccgagagcaggtcatcctctctgctgttacgggacaggctgatgtcgggcttgctttttccggcggctatgacagagcggagcgaaaacgggcgattctgtatccagagtacattactccggaagaatcggattttgaattgcaggcgtttaacgtccgttatgctgacaagtttgtctcagtagatcatcgttctctgcttggtgcattaatgggcataggattaaagcggcaaaaattcggtgacatcgtgttttctgagacagcagtgcaattgattgtctcagccgataccgctgattttgtggctgcacagctgacccaagcaggcaaagcggcggtcagcctagagaaaattgacttgtcagaccttaacattccagcagttgatgtcgaaataagagatgacacggtttcttctttaaggcttgacgccgtctgcgcctctatgagcaggcaatcccgccagaaatcacagacgcttgtgaaaaacggccttgtgaaagtgaactggaaggtggttgaagatccttcatacatagtcgcggaaggggacatgctgtcaatcagaggttttggccggtgcagcttaacaaaaatcgaaggaaaaaccaaaaaagacaaatggagagttacgtttgaacgacaaaaatagtcggtttttcagtttttttctccatctgtgcgaaatttgttttataatgtgaactagataaccgtactgaaatgtaaaaaatggaggtggcatcatgccattaacgccaaatgatattcacaacaagacgtttacaaaaagttttcgcggatatgatgaagatgaagtaaatgaattcctagcccaagtcagaaaagattacgaaattgttctccgcaagaaaactgagcttgaagcgaaagtcaatgagctagatgaaagaatcggacactttgccaatattgaggaaacattgaataaatcaattttagttgctcaagaagcggctgaagacgtaaaacgcaattctcaaaaagaggcaaagctgattgttcgggaagcggagaaaaacgctgatcgcattatcaacgaatcgttatcaaaatcaagaaaaattgcaatggaaattgaagagctgaaaaaacagtctaaagtgttcagaacacgtttccaaatgctgattgaagctcagcttgatcttctgaaaaatgacgattgggatcatctccttgagtatgaagtcgacgctgtatttgaggaaaaggaataaattctctgattatcttgacattttcttagcttgtcgaatataatacgttcataaattcagatgaaaaaacggttgaaagggacagtcatgtttccttcaggccttcatagcgacccggagatggtgagagtccgggatggccggaatcatgtagatcagccctttagtttccttgctgaactcacagtaggttaggacgttcatcacgttacgatgctcaagaggaaaaagtgtatgctggctttttctaaaagggtggtaccgcgagataagctttctcgtcccttatgggatgagagggctttttttattttctgaaaaaatgcagtggaggaatgaaaatggattttaaagacacgctcttaatgccgaaaacagatttcccgatgcgtggaaatttgccaaaccgtgagcctgacattcaaaaaaaatgggaggaagaggatatctaccgtcttgttcaggaacggacgaaagaccgcccgaaatttgttttacatgacggacctccgtatgcaaacggcgacatccatatgggccatgcacttaacaagattttgaaagacttcattgtccgctataaatcaatgagcggctacaacgcaccgtatgtgccgggctgggatacacacggattgccaattgaaacagctctgacaaaaaacaaaaaggtcaaccgcaaagaaatgtcagtagcggaattccgcaaactatgcgaagagtacgcttggaagcaaatcgagggacagcgtgagcaattcaaacgtcttggtgtccgcggtgactgggaaaacccatacgtgacattaaaaccggaatacgaagcgcagcaaatccgcgtatttggtgaaatggcaaaacgaggctacatttacaaaggccttaaaccggttaactggtcaccttcaagtgagtctgctctggctgaagccgagatcgaatatcaagacaaacgttcagcatctatttacgtcgcttttggtgtaaaagacggaaaaggcgttcttgaaaacggcgagcgcatcattatttggacaacaacgccttggacaattccggcgaacctcggaatttcagtgcaccctgatcttgagtacagcgtgattgcagtaggtggtgaccgctttgtcgtagcaagtgcattagtcgaaaatgttgcatcggcatgcggatttgatcagtatgaagtgacaagaacggtcaaagggaaagaccttgagaacattatcgctgaacacccgctatatggcagagactctctcgttatgcttggtgaacacgtaacaactgatgccggaacaggctgtgttcatacagcgccaggacatggggaagatgactttatcatcggccaaaaatacggtttagatgtgctttgcccggttgatgaaaaaggtgtaatgacaagcgaagctcctggctttgaaggcatgttctatgatgatgcaaacaaagcgatcacacagcagctcgatgaaaaaggcgcacttgtgaagcttgaattcattactcactcttatccgcatgattggagaacaaaaaaaccaaccattttcagagcgacagcgcaatggtttgcgtctattaaagatttcagatcagacctgctggatgccattaaagaaaccaaatgggttcctgaatggggcgagcagcgtttgcacaacatggttcgggaccgcggagactggtgtatttcgagacagcgtgcgtggggtgtgccgattccggtattttacgctgaaaacggagaaccgattattacagatgaaaccattgaacatgtttctgaattgttcagacagcacggatcaaacatttggtttgaaaaagaagcaaaggatcttcttccggaaggctttacgcatcctggcagcccgaacggcacatttacaaaagaacaggatatcatggatgtttggtttgattcaggctcttcacatcaagcagtgcttgaagaacgtgatgacctcgttcgcccggctgatttatacctagagggatctgaccaatatcgcggctggtttaactcttctctttctacagcagtagccgtaacagggaaagcgccgtataaaggtgtgctaagccatgggttcgcactggatggagaaggacgcaagatgagtaaatcaatcggtaacgttgttgttccggctaaagtcatgaaacagcttggtgccgacatcttaagattatgggtatcttcagtggattatcaggcggacgttcgcgtgtctgacgccattctaaagcaggttgcggaagtatatcgtaaaatccgcaacacgttccgtttccttcacggcaaccttttcgattttgatccaaaaacaaatgcggtggctgtcgaagatcttcgtgaagtggatcagtatatgctgattaagctgaacaagctgattgataaagtgaaaaaagcgtatgatgagtacgaatttgcggttgtgtatcacagcattcataatttctgcacaatcgaattgagctcattctaccttgattttgcaaaagatattgtctacatcgagcatgcggatcatccggatagacgcagcatgcagacagtattctatgaaacgcttcttgctttagtgaagctttcagcgcctatccttccacatacggcagacgaattgtggtctcatttaacatttgttgaagagcagagcgttcagctgacagatatgccggaaacaatcgcggttccaaacagtgaagtgactgaagaaaaatttgaccgttttatggctcttcgtgatgacgtgctaaaagcattagaaactgcgcgaaatgaaaaaattatcggtaaatctttggaagcaaacctgaaattgtatccaaacaaagaaaacaaagagctcttggcttccataaaagaaaacctttctcagctgtttattgtgtctgaactgacaatcagcgaagaaaatgatgcgccgaacgatgcgcaaagctttgcgacgggtaaaatcgctgtcgagaaagcggaaggcgaaatgtgtgagagatctcgtgtgatttcaaaagatgtaggggcaaatccgaaatatcctacactttcattacgcaacgctgaaatcgttgaaaaatactatcaaaaataatgaaaagggcccggcgtaaaagccgggctttttttgtgccaagagtgacatcctttagaacggcaggaaaaatcttatgggctttagatcatcattcataggcaacaataaaggtactacgttaagagcaggagttgtgaagaatgaatgatcaactgaccgcaatttatacggaacttcttctgatgaaagaagaattacagtcgagattatttgagtattcttgctttcaggtttctacaagcccgcaagcagcaatcaatcataaacaaaaagcaactctgatctatcatattaaagaagagcttcaagacgttctccttgcattgtccaaaatcgaaaacggcacattcggatactgtgaagaaaccggggctcccattcctctttcaaagctggcagtgctgccgacggcccgaacagcaaacgattttctttattctgtccaatttgagaaaaaaacgcttccgatatggaaatcaacggatatcgaatatggtcaggcactgtatgaataacagtgtctggccggttattatgcctgatatttctttactccagtgctttttattgataaaatgcataatggattaaagtaaccgtaaactggaggaacgtttgtgctgtattatatgattgcactacttattattgcagccgatcaattgacaaaatggctagttgttaagaacatggaacttggccaaagcattccgatcattgatcaggtattctatatcacctcccatcgcaatacgggtgctgcatgggggatattagcgggtcagatgtggtttttctacctcataacaaccgctgttattattggtattgtttattacatacagcgttatacaaaaggacaaaggcttcttggcgttgctctcggacttatgcttggcggtgccatcggcaactttatcgatcgggctgtcagacaggaagttgtggattttatccatgttattattgtcaattacaattacccgatatttaacatcgcggactcttcattatgtgtcggcgtaatgcttttatttatacaaatgctgttggacagcgggaaaaagaaaaaggagcaatagcatgaatcaaattgatataaccgcttcagaagaacaaaaaagtgagcggattgataaatttttggcatcgactgagaatgattggtcaagaacccaggttcagcaatgggtaaaagacggacaggttgtcgtgaacggaagcgcggtgaaagcgaattataaaattcagccgggtgatcaggtgaccgtcactgtacccgaaccggaagcgctcgacgtcctggcagagcctatggatctggatatttattatgaggaccaggatgtgctggtcgtcaacaaacctcgcggaatggttgttcacccagcacccgggcatcttacgggcacacttgtaaacggccttatggctcattgcatagacctttccggaataaatggtgtgatgcgcccgggtattgttcacagaatcgataaggacacgtccggtttattaatggtggcgaaaaatgatatggcgcacgagtcacttgtaaaccaattggtcaacaaaacggtcacgcggaaatatacggcagttgtccacgggcttatttctcacgatgatggcacaattgacgcgccgatcggacgagataagaaagaccgtcaaagcatgactgtgacacgtgatggcaaaaacgctgtcactcattttcatgtactagagcgttttcaggattttacgttagtggaatgccagcttgaaacagggagaacccatcaaattcgtgttcatatgaaatatatcggcttcccattagcaggcgatccgaaatacggcccaagaaaaacaatcgactttaatggccaagcgcttcacgcgggagttttaggttttgaccatccacgaacaggagaatatgtcgaatttgaagcgccgcttcctgaggatatggcagaattaatcgaaaacctcagaaaaaacggttgacagagggtttcttttctgaaataataaacgaagctgaatagattctttaaaacagtccagagaggctgagaaggataacggatagacgggatgcgtgtataggcgcgcaccttgtcctaaaacccctctatgctctggcaggaggggttttttcttctatatgaactgtgaggtgtcacacattgaatcaaaaagctgtcattctcgacgaacaggcaatcagacgggcgctgaccaggattgctcacgaaatgatcgaacgcaataaaggaatgaataactgcattcttgtcggcattaagacaagagggatttatctggcaaaacgccttgcggaacgcattgaacagattgagggaaatcctgttacagtcggtgaaattgatattactctttacagagacgatctttctaaaaaaacgagcaacgatgaaccgcttgtaaaaggtgcagatattccggtagatatcacagatcaaaaagtcattctcgttgatgatgttctgtataccggaagaacagtcagagcaggaatggatgcgcttgttgatgtaggcagaccttcctccattcagcttgcagtgcttgtggacagaggacaccgggagctgccgatccgagcggattatatcgggaaaaacatcccgacatcaaagtctgaaaaggttatggttcagcttgatgaggtagaccaaaacgatctcgtcgccatttatgaaaacgaataatagatcacctttttaagggcaatccagagaggttgcaaagaggtgcacaacaaaggcccaaaaagcattcggcaggtctttgtatgcctctttgcgtaaaaaagcaaagaggtttttttatacagtcattgagtcatcctaaaatgaaagtcaacaatcagggggaaatcatcatgagtaagaaaaaagtaaatttaggggtcagggatgtcccgacacctttctcttgggtttcattcagccttcagcatttgtttgccatgtttggctcaaccatcttggttccgaagctcgtcggaatgagtcctgctgtggcgttggtgacaagcggcatcggaacactggcgtaccttcttattacgaaagggcaaattccggcgtatctcggttcatccttcgcctttatttctccgatcattctggtaaaagcgaccggcgggccgggagcggcaatggttggagcgtttcttgcagggctggtgtacgggctgattgccttattgatcaggcagcttggaacaggatggctgatgaagattctcccgcctgtagtcgtagggcctgttattatcgtcatcgggctgggactggcaagcactgcggtaaacatggcgatgtatgctgatccaaatgcgagtgagttggtctacagcttaaagcactttagtgtcgcaggagttacgctggcaatcacgattatttgtgcgattttcttacgaggatttttaagcctgattccggttctgatcggaatcatcggcggatacctgtttgcccttactcaagggattgtcaacttccagccggtgcttgacgcgaaatggttcgcagtgcctgaatttatcattccgttcaaagattattcaccatcagttacactcggcatcgcagccgcaatggttcctgtcgcatttgtcacaatgtcagagcatatcggccaccaaatggtgctgagcaaggttgtcggacaagacttcattaaaaagccaggtcttcatcgctctattatgggtgacagtgtggcgacaatcctcgcttccctgatcggcggtccgccgacaacgacttacggagaaaacattggcgtgctggccatcacaagagtattcagcgtctttgtcatcggaggagcggcagtgattgcctgttgcttcggctttatcggcaaaatttcagcgctgatcagttcagtgccgtcagcggtcatgggaggcgtctccttcctgctgtttggaatcattgcttcaagcggtctgagaatgctgattgacaacaaaattgattatgaaaacaacagaaacctcattattacatcagttatccttgtcatcggtgtaggaggcgcttttatccaagtgtctcaaggcggattccaagtgtcaggaatggcgcttgccgcaattgtcggtgtcatcttaaacctgattcttccgcaggcgaaggaagagcagaaagacacatctgaacaacatcatatctaaaaccttttaatgaaagtccagagaggcttggaagggttatgaagagaagggagcttcaatgctgccctctatttaaccataccccgagtctatcttagaccggggtttttttcagccttaagttgaaaagagaggggaaagaacatgaagcatttaacgacgatgagtgaactcggcactgaggaaatcaaagatttgcttcaaacagcacaagaccttaaaagcggaaaaacagacaatcagcttacaggaaagtttgccgcaaacctgtttttcgaaccgagcacgagaacgcggttcagctttgaggtcgcagaaaaaaagctgggcatgaatgtgctcaaccttgatggaacaagcacaagcgtgcaaaaaggcgaaaccttatatgacacgatccggacgctcgaatcaatcggtgtggacgtctgcgtcatcaggcacagtgaggatgagtattatgaagagcttgtcagccaggtgaacattccgattctgaatgcgggagacggatgcggccagcatccgacacaatcactgcttgatttaatgacgatttatgaagagttcaatacgttcaaagggcttaccgtctccattcacggcgacatcaagcatagcagagtggcaaggtcaaatgcggaagtgttgacaagattgggtgcccgggtcctattttccggcccttcggaatggcaggatgaagaaaatacattcggtacgtatgtctcaatggatgaagcagttgagtcttccgatgttgtcatgctgctgcgcattcaaaatgaacgacatcagtccgctgtcagccaggaaggctatttaaacaaatacggcttgaccgtagaacgggctgagcgtatgaagcggcatgcgatcatcatgcatcctgctccggtaaacagaggagtggagattgatgacagcttagtagaaagcgaaaaatcaagaatcttcaagcaaatgcaaaatggcgtatttatcagaatggcagtgatacagcgtgccttacaaaccaatgtgaaaagaggagaagcagcgtatgtcatatctcattaaaaacggctggatactaaacgaaaatggtgaaaaaacagaagcggatatccgagtgactggagaaaccatcaccgcaatcggcaagcttgatgcaacggataatgaaacggtaattgatgcgaaaggtttgctcgtttcacctgggtttgttgatctccacgtgcatttcagagagccgggcggagagaaaaaagaaactattgaaaccggggccaaagcggcggcacgcggcggctatactacagtagcagcaatgccgaatacgcggccggttcctgatacaaaggagcagatggaatgggtgcaaaacagaattaaagaaacatcatgcgtcagagttcttccatatgcatccattacgatcaggcaaatcggcgatgaaatgacaaactttgaagcattaaaagaagccggggcatttgcttttacagatgacggtgttggtatacagacagcaggtatgatgtatgaagcgatgaaacgggcagctgcaattgacaaagcgattgttgcacattgcgaggacaactccttaatttacggaggaagcgtacatgaggggtcattctccaaagcgaacgggctaaacggcattccttctgtgtgtgaatcggttcatattgcccgcgatgtgctgctggctgaggcggcaaactgccattatcatgtatgccatatcagcacgaaagaatctgtcagagttgtacgcgatgcgaaaaaagcgggaatcagagtgacagcagaagtgtcgccgcatcatttgctgctttgtgatgaggatatcccggggctggacacaaactataaaatgaatccgccgctccgcagtgcagaagacagagctgctttaattgaaggtcttttagacggaacaattgattttatcgcaacagaccatgcaccgcatacggaagaagaaaaaaacacagaaatgaaactggcgccattcggaattgtcggcttagaaacagcattcccgcttctttacacacactttgtcaaaaatggcagctggtcgctgaagcagttgattgactacatgacaatcaagccatgcgaagcgttcggtctcccatatggaacattacaaacggggcaagctgcggacattacgttaatcgatttagaaaaagaagcagttatagacaaagacacgtttttatcaaaaggaaaaaatacaccattcaacggcatcagctgcaccggctggccggtcgctacaattgcggcagggaagcttgcttatgaagaggggagacttgtcaaatgaagagacgattagtactggaaaacggagcggtattcgagggagaagccttcggaagcttagaacacaacatgggagaagtcgtttttaatactgggatgacaggctatcaggaaattttatctgacccttcttactgcggacagatcgtaacattaacatacccgcttatcggaaattacggcattaaccgtgatgattttgaatccattaccccttttgtaaaagggctgatcatcaaagaattatgtgagctgccttccaactggcgttcagcatacaccttagacgagtatttaaaaatgaaaaacattcccggactccaggggattgatacaaggaagctgacaagaatgatccgcacggcaggcgcgctaaaaggaacattcgcttcatctgatgaagatatcgaagcagtgctgaaaagactgaacgaaacggaattgccaagaaatcaagtatcccaagtatcagcaaaaacagcatatccgagcccgggaagaggcaaacgcatcgtcttggttgacttcggcatgaaacacgggattctaagagagctgaacaaacggaaatgtgacgtcatcgttgtgccttacaacattacagcggaagaggtgcttcagctgaaaccggacggtatcatgctttctaacggacctggagacccgaaggatgtgcctgaagcgattgaaatgattaaaggtgttcttggaaaagtgccattattcggaatatgtcttggccaccaattattcgcgctggcgtgcggggcgaatactgaaaaaatgaaattcggccacaggggctcaaaccacccggtaaaagagctggctacaggaaaagttgccttaacatctcaaaaccatggatatacagtttcgtctatcagtaaaacagaactggaagtgacgcatatcgcaattaacgacgatacgattgaagggctgaagcataaaacattgccggcatttacggttcaatatcatcccgaagcctcacctggtcctgaggatgccaaccatctatttgacagattcatcgaaatgatcgaaacaacagagaaagaaggggaagcggtatgccaaaacgcgtagacattaacaaaattttagtaatcggatctggaccgatcatcatcggccaagcagcagaatttgactatgcgggaacacaagcctgtcttgctttgaaagaagaaggctatgaagtcatccttgtcaactcaaaccctgcaacgatcatgacagatacagaaatggctgaccgggtttacatcgaaccgctcacacctgaattcctgacacgaatcatcagaaaagagcgcccggatgccattcttcctacactcggaggccaaaccggtttgaatcttgcggttgagctttctgaaagaggcgttttggcagaatgcggcgtcgaagtgcttggcacgaaactgtctgcgattcagcaagctgaagaccgtgacttgttcagaacattaatgaatgaactgaatgaaccggtgcctgaaagtgagattatccactcccttgaagaagcagaaaaattcgtcagtcaaattggattccctgtcattgtccgcccggcatatacattaggcggaacaggcggaggtatctgctcgaatgaaacagagctaaaagaaatcgttgagaacggcttgaaattaagcccggtacaccaatgtcttcttgaaaaaagcatcgccggctataaagaaatcgagtatgaagtcatgagagacagccaggatcacgccattgtcgtttgtaacatggaaaacattgatccagttggaatccatactggagacagtattgttgtcgcgccgagccaaacgctcagcgatcgcgagtatcagctcttgcggaatgtatcgttaaaactgattcgcgcgcttgggatcgaaggcggatgtaacgtccagctcgccttagatccagacagcttccaatattacattattgaagtaaatccgcgtgtcagccgttcatctgctcttgcatcaaaagcaacgggatacccgatagcaaagctcgctgctaaaattgcagtcggactttcattagatgaaatgatgaacccggtgacaggaaaaacatatgcagcatttgaacctgctcttgactatgtcgtatccaaaattccgcgctggccgtttgataaatttgaatcagcaaacagaaagcttggcacgcaaatgaaagcgacaggtgaggtcatggcaatcggccgcacgcttgaagagtcattgctgaaggcagtgcgttcgctggaagcggatgtgtatcatcttgaattgaaggacgccgctgacatttcagatgagcttcttgaaaagcgaattaaaaaggccggtgatgaacgcttattctacttagctgaagcgtacagaagaggctacacggtagaagacctccatgaattttccgctatcgatgtcttcttcttgcataagctgttcggaatcgtacagtttgaaaaagaattgaaggccaatgcgggcaatacggatgtgctgagacgggcaaaagaactcggcttctctgatcagtacattagccgcgagtggaaaatgaaagaatctgagctttacagcttgagaaaacaagcggggattgcgccggtattcaaaatggtagatacgtgcgcggcggaattcgagtcagaaacgccatacttctatagcacatacgaagaagaaaatgaatctgtcgttacagataagaaaagtgtgatggtgcttggttcgggtccgattcgaatcggtcagggtgtcgagttcgactatgcgacggttcactctgtatgggcaattaaacaagcaggctatgaagccattattgtcaacaacaacccggaaaccgtttcaacagacttcagcatctcagacaagctgtattttgaaccgcttacgattgaagatgttatgcacatcattgaccttgaacagccaatgggcgttgtcgtacagttcggcggacaaactgcgattaaccttgctgacgagctttctgcacgcggagtgaaaatccttggaacttcattagaagatttagaccgtgcagaagaccgggataaatttgaacaagcgcttggagaacttggtgttcctcagccgcttggcaaaacagcgacatcagttgatcaggcggtaagcatcgcgagtgatatcggttatccggtactggtgcgcccttcctatgtacttggcggccgggcgatggagattgtttaccatgaagaggaactgcttcattacatgaaaaatgcagtcaaaatcaatccgcagcaccctgtattaattgatagatacttgaccggaaaagaaattgaagtcgatgcagtatccgacggtgaaacagtcgtcattccgggaattatggagcacattgaacgtgcgggcgttcactccggagactcgatcgctgtttatccgcctcagtctctcacagaggacattaagaaaaaaattgaacaatacacgatcgcattggctaaagggctgaatattgtcggtttgctcaatattcaattcgtcttgtcgcaaggcgaggtgtacgtgctagaagtgaatccgagatcaagcagaaccgtaccgtttttaagcaaaattacgggtatcccaatggcgaatctcgcaacaaaaatcattcttggtcaaaagctggctgcgtttggctatacagagggccttcagcctgaacagcaaggtgtatttgtaaaagcgccggtcttctcctttgccaagctgagaagagtggacattacgttagggcctgaaatgaaatcaacaggtgaagtcatggggaaagattcgacacttgaaaaggcgctctacaaagccttgattgcttcaggtattcaaatcccgaactacggttccgtgcttttaaccgtagctgataaggacaaagaagaagggcttgccattgctaagcggttccacgcgatcggctacaacattttagcgacggaaggaacggcaggctacctgaaagaagcttccattccagcgaaggtcgtcggaaaaatcggtcaggatggcccgaacttgcttgacgtcatcagaaacggagaagcgcagtttgtcatcaatacgctgacaaaaggaaagcagccggcaagagacggttttagaatcagacgtgaatcagtagaaaatggtgttgcctgcctaacatctttagatacggcagaggcgatattgcgagtgctggaaagcatgacattccgtgctgatcaaatgccggcagtcaacacaaatcaggaggcggcagtcactatatgaaaaaagcgtatttgacagtatgttctaaccagcaaattgcagaccgggtgtttcaaatggttctgaaaggggagcttgtccaagggtttacaacccctggacagttccttcatcttaaagtgagcgaagcggttacgcctcttttgagaaggccgatcagcatcgcagacgtcaactttgaaaaaaatgaagtcaccatcatttatcgggtagatggtgaagggacaagactcttgtcactgaagcagcagggagaacttgtggatgtcctcgggcctttgggaaatggctttcctgttaatgaagttcaacccggaaagacggctttgctggtaggaggcggagtaggtgtgccgcctctccaagagctgtcgaaacgcttgattgaaaaaggggtaaatgtcatccacgttttaggattccaatcggcaaaggatgtattttacgaggaagaatgcaggcagtacggagacacgtatgtggcaacagctgacggaagctacggggaaaccggatttgtcacagatgtgattaaacggaaaaatctagagtttgatatcctcctcagctgcgggccgacaccgatgctcaaggcgttaaaacaggaatatgcccataaagaagtatatctgtccatggaggaacgaatgggctgcggaatcggcgcatgcttcgcgtgtgtgtgccatacaaacgaaagtgagacatcctatgtaaaagtatgtctcgacgggcctgtatttaaagctcaggaggtggcgctgtaatgctagaggtgaaattgccgggacttgatttgaaaaacccaatcattcctgcatcaggttgcttcggttttggaaaagaattttcacgtttttatgatttgtcttgtcttggagccatcatgattaaggctacgacaaaggagccgcgctttgggaatccgacgccgcgggtagctgagactggtgctggaatgctcaatgcgatcggtctccaaaatccggggctggatagtgtgttgcatcatgagctgccgtggcttgagcagtttgatacaccgatcattgccaatgtcgcaggttctcaagtcgatgattatgttgaagtcgcagaacatatcagcaaagcgcctaatgtccatgcacttgaattgaatatttcctgcccgaatgtgaaaacaggcggaatcgcttttggcacgaatcctgaaatggctgccgatttgacaaaagcggtgaaagaggtttcggatgtacccgtttatgtgaagctttccccgaacgtggctaatatcacagaaattgccttagcgatcgaggaagcgggagcggacggtcttacgatgatcaacacactaatcggcatgagactcgatttaaaaaccggcaaaccgatattagcgaataaaacagggggactttcaggccctgctgtgaagccggttgccattcgcatggtgtatgaagtcagccaggcggtcaacatcccgattatcggaatgggaggcgtgcaaacggctgaagatgccctggaatttcttctcgcgggagcaagcgcagtcgctgtcggaacagcaaactttgtgaatccttttgcatgtccagagattattgaacagctcccatctgttttgctccaatacggctatcaatcaattgaagaatgcatcggaaggagctggaatcatgaaaaacaacctgcccatcatcgcgcttgattttgcgtcagctgaagaaacacttgcgttcttagcgccttttcagcaagaaccgttatttgtaaaggttgggatggagctcttttatcaagaagggccatctatcgtgaaacaactaaaagaaagaaactgcgagctatttttagatctaaagcttcatgacatcccgactactgtaaacaaagcgatgaagcgccttgccagtcttggagtagacctcgtcaatgttcatgctgccgggggcaaaaaaatgatgcaggcagctctcgaaggcttagaagaaggtacgccggctgggaaaaaacgtccgtcacttatcgcggtaacccagctgacaagcacatctgaacaaatcatgaaagatgaactgctgatcgaaaagtctctgattgatacggttgtgcactacagcaaacaggcggaagaaagcggactggatggagtggtctgctctgttcatgaagcaaaagccatttaccaagcggtgtcgcctttatttctgactgtcactccggggatcagaatgtcagaggacgctgcgaatgaccaagtccgcgtagcgacgcctgccattgcaagagagaaaggttcatcagcgattgtagtaggacgctcgattacaaaagcggaagacccggtaaaagcctataaggctgtcagacttgaatgggagggaatcaaatcttgaaacaaatcatcgcaaaacatctattagacatccaagctgtatttttacgcccgaacgagccgttcacatgggcaagcggcattttatcaccgatctactgtgacaaccgccttacgctatctttcccagaggtcagaaacgatgttgcttcaggtatcagcaagcttgtcaaagatcattttcctgaagctgaaatgattgcgggaacagcaactgccggtattcctcatgctgctcttgcggctgaccgtttgaatcttccgatgtgttatgtgaggagcaagccgaaggcgcacggaaaaggcaatcagattgagggagctgtgcaagaggggcaaaaaacagttgtcattgaagacttaatttccacaggaggcagcgtgcttgaagcttgtgcagctttacaagcggccggctgtgaagtgcttggtgtcgtctcaatctttacgtacggacttcccaaagcggaggaagccttcgcaaaggcagaactgctatactactcattaactgattatgatacgctcacagaggtcgcgcttgaaaacggaaatattcattcagatgatctaaaaaagctgcaaacatggaaacgaaatcccgagtcaaaagattggtttaaaaaataaaaaataaattcaaatgatgtaaagaggcttcaaagccttgctgtacttgaaaacaggctgtgaggcctgtttttttattaatcctataaaaaaagtcgggttgacttatgttagaattgtgctaaaatttactacaaatctaaaaacttatcaagagcggctgagggactggacctatgaagcccggcaacctgcatagtttgtaaggtgctacttccagcaaaatgaattccattttgaaagataagggctgcatgctgttcctgtctttctttccgccggattgaaagttttttattttaagaggaaaaaaggctgtctgtgatatcagcagccgcgaatcacattacaattgggaaaagacaaccggcagaaagctactgtttgtttgtctccgaaaggaggaaagaagaaatgttaacgtacgataattgggaagaaccaacgattacatttccggaagacgatccttataaaggagcgctgtcagttttaaaatgggcatacggccattacggcaatcagcttgtttatgcctgcagtttcggaattgagggaatcgttctgattgacttaatttataaagtgaaaaaagacgcagagattgtgtttcttgatacaggacttcattttaaagaaacctatgaaacaattgaacgagtgaaagagcgttatccgggtcttaatatcatcctgaaaaaaccagacctcacccttgaggaacaagccgaagaacatggtgacaaactgtgggaaagagagccgaatcagtgctgctatcttagaaaggtcgttcctttaagagaggcgctttcaggacatccagcctggctttccggcctgcgccgtgatcaagggccaagccgtgccaatacgaatttcttaaacaaagatgaaaaattcaagtcagtaaaagtttgcccgcttatccattggacttggaaagacatttggagatacacatcccggaatgaactggactacaatccgcttcatgaccaaggatatccaagtattggctgtgcgccttgcactgctcccgcttttactgcagaggatttgcgctcaggcagatggaatggtatggcgaaaacagaatgcggactgcatgaataaggagctgcaaaatggaattagccgctattttatttagcttgtttttcgcgatgaatattggtgcaagcggcgctgcagcttcgatgggggttgcttacggctccggagccatcaaaaagaaaacctacgctttgatcctatgcgcagtcggtgtctttgccggggcggtcattggcggaggcgaggttgtaaaaacaatcagctccggcattattcctgagcagacgattacactgacgattgtttgcatcattattggagctgctgccctgtcgctctttactgctaatctgctcggcattcctttgtcgacaagtgaagtaacagtcggcgcggttgtcggcgtgggagtggcttataaagtattgtttgtgaacaatcttctgatcattgtgtcattttgggtttttgtcccgctgttcgctttcggcttcacctatttcgtatctaagctgtttcgttattttaagattgaagtaaaatcttctaaaaaacaaaaaatcctcggcattgttttgttagttgccggatttttcgaagcattctctgccggcatgaataacgtggcgaatgctgttggcccgttagtagctgccgatgtgcttgatgtcggaaaaggaaccttgtatggaggagcttttgttgctcttggcgcactgttattaggccggcgtgtgctagaaacaaacgggaagaaaattacgagattctccaaaggggaaggcattctcttatccggtacaggagcaggacttgtgatcatcagttctgtatttgggatgccggtgcccttggcgcaagtcacgtcatcgtctattatcggaataggcatggcaaaaaacggtccgaacgtgttccataaacaagttgttcaaacgatgctgaaggtatggatcgtatcgccgtttttatctttatcgatttcttatctgcttgtatccttgtttttaaaagcagattattattcgatctttatcatggtaagtgtgcttttagcggcgggcggtgccatcagcctgacaaaggccattcgtaaagagagacgctcagtccacgaacaaggcgggggaatctgatcattaatctgagtaattttataagttaactaggaggagatggatattatgagcttagcaccacacggaggaacattagtaaacagagtagatgaatcatatgatgtgagcggcattcaaaaagaaattgaacttgatttaatttctttcgcggatttggaattgatcggtatcggtgcatacagcccgattgaaggtttctttaatgaaaaagattacgtatctgttgtcgaaaacatgcgtctttcttccggtgttgtttggtctcttccaatcacgcttccggtcgatgcgcaaaaagcagcggaactgtcacttggtgaaacggtaaagttaacgtatgaaggagaaacatacggcgttatccaaatcgaagacctgtatgtgcctgacaaacaaaaagaagctgtcaatgtgtacaaaacagatgaacaggagcatcctggtgttaaaaagctgttcagccgcggcaatacatatgtcggcgggccgattacgttgattaaaaaagcttcaaaacagttccctgaatttacatttgaaccgttagaaacgagacgccagtttgcggaaaaaggctgggaaaccattgtcggtttccaaacaagaaaccctgttcacagagcgcatgaatacattcaaaaaacggctcttgaaacagtagacggcttgttcttgaatccgttagtaggtgaaacaaaatctgatgacattccagctgatgtacggatggaaagctaccaagtgcttcttgatcattattacccgaaagatcgcgttttccttggtgtctttttagcggcgatgcgttatgcaggcccgagggaagcaattttccacgcgcttgtcagaaagaactacggctgcacacatttcatcgtcggccgtgatcatgcaggtgtaggtgactattacggaacatacgaagcacaggagctgtttgacacatttaaacctgaagaactcgggattacgccgctgaaatttgagcacagcttcttctgtaaaaaatgcggaaatatgggaacagcgaaaacatgccctcatggcagagagcatcacgtcattttatcaggcactaaggtaagaggtatgctgagagacggtgtgctgccgcctgctgaattcagtcgaaaagaagtcgtagaagtgttaatcaaagggatgaagaaaaaagaagaagtaggcgtatcttaaggaggactggcagtgacaaatcgcgatattgtatggcatgaagcctctatcacaaaagaagagtaccagcaaaaaaacaagcataaaagctccattctctggctgacagggttaagcggctcaggcaaatcaactattgccaacgccgctgcgagagaattgtttgagcaaggctaccaagtgattgtgctggacggggataatatccgtcacggcttaaataaggatcttggtttttctgatgaagaccgaaaagaaaacatccgccgaatcggagaggtggcaaagctttttgttcagcagggaaccattgtgattactgcttttatctctcctttccgcgaggacagacaacaggttcgcgagcttgtggaagcgggcgaatttaatgaagtctacattaaatgcgaccttgatatttgtgaacaaagagatccgaaagggctttacaaaaaagcaagaaacggcgagattccgttttttacaggaattgattctccttatgaagaaccggaagctccagagctcgttcttgattcaggacaacatgaccgtgaagcgtgtaaaaatcagctgatcgagtttgttaaacaaaaattgagctgaatatgatctgctgcgttcttctcagatgccggaatgcaagcgagaacatcatcacagcgaatgctctggaagaactcgaatagatcgggggaaatacgatggggaaagtatatattgtaggagcgggtcctggtgaccctgatctgttgacaattaaagcgctgaaagccattgaaaaagctgatgtcatcttatatgacagattagtaaataaagagattttacaatatgccaaagagcaagcagacctgatctactgcgggaagcttccagattttcatacgatgaagcaggaaaccatcaatcgatttcttgtgaagtatgcgcaaaaagggaaaatggttgtcagactgaaaggcggagacccttttgtgttcggcagaggaggggaagaagcggaatgcctctctgaaaatggaattccgtttgaaatcatccccggcattacgtctggaatcgcggcagccgcttatgccgggattcctgttactcatcgggaggcgggctctaacgtcgcttttgtaacgggtcattataaaaaagaagaagattttgaggaaaagtggaaagcgctggctacaggaattgatacacttgtcatctatatgggtatcaaaaacgtgcagcagattgaaagaaaactccttgaaaacggccgggacggttctacgccggcagcctttattcattggggaacaacggacaagcaaaagtctgttttttgtacagttgacaccctttcagaaacggtgataaaagaaaacattacaaatccgagtttaattgtcattggaaatgttgtaaattatcactataagctggaatggtttgaatctgaactgaaaaaacaagatttaagcgaggcgttgtaaaaatgaaacaagcaattttatatgtcggccacggcagccgggtcaaaaaagcgcagcaagaagccacagcctttttggaaggatgcaaggcccacatctctgtgccagtacaagaaatcagctttttagagcttcaggagccggcaattgagacaggatttgaagcatgtgtgaagcaaggcgccactcatatcgcagtggtgcctctgcttcttttaacagctgcgcatgcaaaacatgatattccggaagaaattgcccgtgctgcatctcgatatccgtcagtccgcatttcatacggaaagccgatcgggattgacgaagaagtagtcaaggctgtatatcaccgaatgaaagacataggtgttccatatgaaaatgccagagtggtactcatcggaaggggaagttcagatccagatgtcaaaagagacgtaaccggtattgctaatcttcttcaggaaatggttccagtcaaggaagtcattccgtgctttttgacagcatgcggcccgaattacaaagaggttttttcagaacttaaaaaagatgacggcataacaacctttatcgttccatatttgctctttacgggtatgctgatgaatgaaatcgaacgagaggttcagaaattaaaagctcataatccgaacgtctacctctcttcctatatcggttttcatcctcatgtgaaaaacgcatttttgaaccgtgtgagagaaactgcggcaaattctgagggacaatttgattttgatggagattcatatgcttccgctgcacattagcctggaaaagaagaaggttgtgattgcggggggcggcagcatcgctctcagaaggctgaaatcggtgatttctgagggagctgatataacgctcgtcagtccggatgttgaaccggaaatcaagcaaatggcagaagagcgacgtatcaaatgggaaaaacggacaattgaaaaagaagattatctcaatgctttcttcattattgctgcgacggataatgcggcagtgaacaaagaaattgcccaatccgcttcgccttttcagcttgtcaattgtgtcagtgacgctgagcttggcaatgtatatatgccgaaaattgtaaaaagagggcatgtcactgtgtctgtttctacaagcggagccagtccaaagcacacgaaagagcttgctgaaaacgtggataagctgattgacggcgattttattgctgaagtgaacaggctttatcaggtgagaaggaagaaataagccagagcatacaaatgctctggcttttctttatgcggctcagctttttttgagcttgatgacagtatcagcatcaggcgtgacaaagacggtatgctggctgtcataggtgacgaaaccgggtttcgcgccgtttggttttttgacatgcctgatttttgtataatctacaggcactgaacttgaatctttagcttttgaaaaataagctgcaattgtcgcggcttccatgattgtttgctcatccggttcgctgcttctgatcacaacgtgggagcctggaatgtcctttgtgtgaagccagatatcgtctctggccgccgctctggtcgttaaatattcattttgacgattgttcttacccactaaaatcgtcaggcctgaggtggattcatatgtttctaacaccggattgtgcggtttttgctttttctggcctttttgctgcttagggcgtaaatatttgccctcaacaagctcttccctgatttcgctgatatcccggggagaagcggacgaaagctgctgaaacagctgatcaaaatattcgatctcttcctgtgccagcctgatttgctcctcgacaactgcgaccgaatttttcgctttctgatacttcgtgaaataggcctgtgcgttttcagaaggcgttttgtttgggtttaaaggaatcgtgattgtcgggctttcttcattataataattgatgacctcagcctgtttatcaccttttttcaacatatataaattagcggttaaaagctccccgtaaagctgaaattccttcgcgttttccgaatactccagggttttctctaattttttgattttgttggcattcttcttccgttcgttcacaacaaaacgctcaagatcctgagcctgttgcttgacccggtctcgttcagcttttccgaaataaaaacggtcgagcagttcgcttaatgaatcaaaacggcgcgcttcgccctttagatgagtcagctccagcaggtaaaaatattcctttccgtttacagtcgtaatgttgggaatgaaacggtgctctttcacttcagcaaacagtgccagcaacgcttttggcagtgtgactttgttggcaaggcctgctctgtgaaccgcttctttggcgaaaagcggagacacgcctgaaaagtggtcgacaatttgtttatcaagccttccttcttgaaagctgaggtgacgcaaaatatcatcttctgacgcctcaagaggcgatattttgtcctgagcaggcggaagcttataatcttggccgggcagtactgtacggtagctgttcattgacggtgataagtgcttaagtccgtcgatgatcacattttctgctgcgtcagtcaaaatgatattgctgtggcggcccataatttctacataaagctttcgtacggtttcatcgccaatttcgtttcggcttttgatatgaaaaatcataatgcggtctaagcccgcttgttcaattttctcaatgaatccgccttcgatatgctttctcagcaacatgcaaaacattggcggttcgcttggattttcataagcttgtgccgtgatatgcacccgtgaatagctcggatgtgccgataataatagtttttggttttttccattggcacggatgtggaaaatcacatcgtgcttatatggctgatggacttttgtaattcgtccgcccattattttctcgttaagttcgtgtgtcattccgtatgtaaacatgccatcaaacgacatatgcaatacaccctctcattcttcctgcattcgataattatagcatgaaatgggacgagtcagaataagcatgcttatagagtgatatctctataagagagcaggggagtggacgagcggaatgaagtttcatgaaatgggacaaacagatttactagaggcaaccaatacgtccatgaaacaaggattaacagaaaaagaggtaaaaaaacgccttgacaagcatggaccaaacgagctgcaagaaggggaaaaaacttcagcgcttctcttgtttttcgcgcagttcaaagattttatggtgcttgtgcttctggcggcaacgttaatctcaggatttcttggtgaatatgtagatgcggttgcgattattgcgattgtgtttgtgaatggcatacttggtttctttcaagaaaggcgtgctgagcaatctcttcaggctttaaaagagctttcaacaccgcatgtcatggcactcagagaaggaagctggacaaagattccttctaaggaactggtgccgggtgatattgtgaaatttacgagcggggacagaattggcgcagacgttcgaattgttgaagcaagaagccttgaaatagaagaatcagcgctgaccggggaatcaatcccggttgtgaagcatgctgataaattgaaaaaaccggatgtttcacttggcgatattaccaatatggcatttatgggtacgattgtgacccgcggcagcggtgtgggggttgtcgtcgggacaggaatgaatacggctatggggaaaattgccgacatgcttgaatcggcagggacattgtcaaccccgctgcaaagaagactggagcagctcgggaagattttgattgttgttgcattgcttctgaccgtacttgtcgttgctgtcggtgttattcaggggcatgatctgtacagtatgtttttagcaggtgtctcgttagcggtagcagctattccggaggggctgccggcgattgtgacagtggcgctatcgcttggtgtacagcggatgattaaacaaaaatccattgttagaaagcttcctgctgttgaaacgcttgggtgtgcgtctatcatttgttcagataaaacagggacaatgacccaaaacaaaatgacggtgacacatgtctggtccggagggaaaacatggagagtggcaggggccggctatgaaccgaaaggaagcttcacactaaacgaaaaagagatcagtgtcaatgaacataagccgcttcagcagatgcttctgttcggagcgctttgtaacaactccaatatcgagaaaagagacggcgaatatgtgcttgacggagatccgacagagggagcgctgctcaccgcggcaagaaaaggcggtttttcaaaggagtttgttgaatcaaactaccgggtggtcgaagaatttccgtttgattctgcacggaaaatgatgactgtcatcgtagaggatcaagacagaaagcgctatatcattacaaaaggtgcaccggatgtactgatgcagcgatcttcccgtatttattatgacggctcagcggctcttttttcaaatgaaagaaaagcagaaacagaggcggtattaagacatttggcatcacaggcgctcagaacgatagcggtcgcctacaggccgataaaagcaggcgaaacaccgtcaatggagcaggcggaaaaagatctgaccatgcttggcctttcaggtatcattgaccccccgcggccggaagtcagacaggcgataaaagaatgccgtgaagcaggaattaagaccgttatgattacaggtgatcatgtagaaaccgctaaagcgatagcgaaagacttgcgcctccttccgaaaagcggcaaaatcatggacggcaagatgctgaatgaactttctgaagaagagctttctcatgtggtggaggatgtatatgtatttgcccgcgtttcccctgaacataaactaaaaattgtaaaagcctatcaggagaacgggcatattgtggcgatgacgggagacggcgtcaatgatgctcctgccattaaacaagctgatatcggcgtctctatgggcattaccgggacagatgtggccaaagaagcatcatctcttgttctcgtggatgataattttgcgacgattaaatcagcgataaaagaaggcaggaacatctacgaaaatatcaggaagtttatcagatacctgttggcgtctaacgtcggagaaattcttgtcatgctgtttgcgatgctgctggcccttcctttaccgctcgttccgattcagattttgtgggtcaacttggtgacggacggattgccggcgatggcgctcggcatggatcagccggaaggagacgtcatgaagcgcaagccccgtcatccgaaagaaggggtatttgcccgcaagctaggatggaaggtcgtttccagaggatttttaatcggagttgccactattttagcgtttatcattgtgtaccaccgcaatccggaaaacttggcttatgcccagacgatcgcgtttgccacattggtgctcgctcagcttattcacgtgtttgactgccgcagcgaaacttctgttttctctagaaatccgtttcaaaacctgtatttaatcggcgcggtattgtcatccattttgctgatgcttgtagtaatctactatccgccgcttcagccgattttccatactgtagccatcacgccgggggactggatgctcgtcatcggtatgtccgccatccctacttttttgctggcggggtcacttttaacaagaaaaaaataaattcatatgatataatcttaggggtaatagcgtgtctattgcccttttattatgagaacagggaagaattgggtgttttaaaatgatacgaagtatgacaggcttcggcagtgcaagcaaaacacaagacgatctctctgtaagcgttgaacttaaatctgtgaactacagatttaaagaagtgaacgctcgtttgccaaggcctttgctatattttgaagataagctgaaacagaccattctgcagcatattcagcgcggaagaattgagcttttcgtatccgttgacagcgatatgcttgttgagaaaaggcttgaaattgattggccgctgctcgatgagtttgtcgcagccgcgagaggtatgaagaaacggtatcaattgtctgcagagcccgatgtaatggatttctttaagcttgatcatgtcgtccaggttcatgaagaacagacgcaaaatgacaagctggaggcgttgatcatcgatgctgcagaagaagcggtaaaaggtctctgtgaaatgcgtgaaaaagaggggctgctcttagcgaaagactgcctgatgcatattgatcagcttgaagagctggtgagagaaactgaattgctggctgcagatgtcgtatctcgttaccgggaacggctgtacgccagaatcaaagaatggactgaagacgtattagacgagagccggcttgtaacagaatgcgctatttttgcagaccgctctgatatcactgaagagattacaaggctgaagagccacttcgcccagtttcgtgatatattagctagtggcggagctgtcgggcgcaaactcgactttcttgttcaggagctcaatcgggaagcaaatacgattggctcaaaagcaaatgatcatcagatcacaaagcttgtcgttgaaatgaaaagttctattgaaaaaataaaagaacaagtgcaaaatatagaatagtgactgtgcgtattgtttacagacggtcttactaggctaaactagagacgtctattttacagggggaacgtagaagatgacgattaaactgattaatatcggatttggcaatatcatctccgccaatcggatgatttcgattgtcagcccggagtctgcgccaatcaaacggatgattcaggatgcaagagaccgcggaatgctaattgacgctacatacggacgaagaacccgtgcagttgtcgtcatggatagtgatcacattatcttatctgccgtccagcctgagacagttgcacacagactttctgttaaagaagaaattatggatgaagggcaggggtaattgccgcatgaaagaaagagggttattaatcgttctctcaggtccctcaggagttggtaaaggaacggttcgacaagcgatcttttcgcaggaagacacaaaatttgaatattcgatttcagtaaccacaagaagtccaagagagggcgaagtgaacggagtcgattattttttcaaaacaagagacgaattcgagcaaatgattgcggacaacaagctgcttgaatgggcagagtatgtcggcaattattacggcacgccagtcgattatgttgaacagacgcttcaagatggaaaagacgtctttttagaaattgaagttcaaggggctcttcaagtgagaaatgctttcccggaaggcctatttattttccttgcgcctccaagcctttctgaactgaaaaacagaatcgtgacacgaggcacagaaacagacgctctgattgaaaatcgaatgaaagccgcaaaagctgagatcgaaatgatggatgcttatgactatgtcgttgaaaacgataatgtcgaaacggcttgcgataaaatcaaagcaatcgttcttgctgaacatttgaagcgtgaacgcgttgcaccaagatataagaaaatgctggaggttgaataatcaatgttagatccgtcaattgattctttaatgaataaattagattcaaaatatacgctggtgactgtttctgcgagacgcgcacgtgaaatgcaaatcaaaaaagaccaaatgattgaacatacgatttcacacaaatatgtaggcaaagctttagaagaaattgatgcaggcctgctttcgtttgaaaaggaagaccgcgaatagtagcacaagtagcaacctatatcagatgtaggttgttatttttttccgtgcggttttgtaaagtgcagagggggagaattcattgctaaacaatcgaaatgtgttactttgcgtgagcggaggcatcgctgtttataaagcctgtgcgttaacgagcaagctggttcaggcaggagcaaatgtcaaagtgattatgactgaatccgcttgccgattcgtttcaccgctgacatttcaggcattgagccgccacgaagtctatacagatacatttaaagaacaaaatccaagcgttatttctcatattgatgccgcagactgggccgacttgattattgtagcgccggctacggctaatgtgattggaaaactggcaaacggcatcgctgatgatatgctgacgacaacattgttggcagcaacggctcccgtttggatcgcgccggcgatgaacgttcatatgtatgaccacccggcagtcaaacgaaacatttctgttctttatcaggacggttatcgttttattgagccaagtgagggctatttagcatgcggttacgtaggaaaaggcagattggaagagccggaaaacatcgtaaagctggccgaaaaacattttgctgaagaaacatccgctcctttagaaggcaagcatgtggtcattacagccggtccaacgcgggaagcgattgatcctgtccggttttttaccaataaatcgacgggcaaaatgggctacgcactagcggaggctgctgttcagctcggcgcacgggtaaccttaatttctgggcctgtttcacttgatcagcctaaaggccttgctgagtttatccctgttcaatcggctgcggatatgcgcgaagctgtgctctctgtgtatgacgcaagcgatatagtcattaaaacagctgcggtagccgattttacgccgaaaacagtatttgaccataaaatgaaaaaacaagacggcggcatgaccttagaactgaaaagaacagtcgatattttgaaagaattgggcgagaaaaagaaagagcagattttggtcggatttgccgccgaaacacaagacattgaacactatgcacgtaaaaagctcgccgctaaaaaccttgatttgattgtggcaaatgatgtgaaagcaaatggggccggttttggtgctgatacgaatatcgtgacaatctttttcaaagacgggcataaacgcgaactcccgatcatgtctaagctcgatgtttcttttgaggtccttcaggagatcgcagccctctcaaaacaaaccggagagcgctcatgaattttgcagaagtcatcgttgatgtcagcaccaaaaatatagacaggccttttgattataaaatcccagaccatctcaagggcatgatcaaaacggggatgcgggtcattgttccgtttggcccccgtaagattcaagggtttgtgacagcagtcaaagaagcatctgacctatcgggaaaatctgtcaaggaagtagaggatttattagatcttacacctgttctgacagaggagcttatgattctgtcatcatggctgtcagacaaaacgctgtcttttaaaataacggcgcttcaagcaatgctgcctgccgccttaaaggcgaaatatgaaaaagaattaaaaattgcacacggagccgatcttccgccgcaagtggaacggctgttttctgaaacaaagacgctgctgtattcagatatacccgatcatgagacgctgaaactgattcaaaggcatgttcaaaaaggggacattgacgtgacgtataaagtcgcgcaaaaaaccaataaaaaaatggtcaggcatattcaggcaaatgcgagtaaagaagagcttgctaagcaggctgagggattgtcccgccaagcagcaaaacagcaggcgattcttcactttctcatctctgagccggaaggtgtgaaaattcctgcggcggaattgtgcaaaaaaacggatacgagctctgcaaccattaaaacccttatccaaaaagggcttttgaaggaaagctatgaagaggtttacagagatccctatcaggacaaaatgttcaaaaaaacagagcccctgccgctgacagacgaacagagggctgccttcgagcccatacgcgagacattggacagcgatgagcataaagtgttcctccttcacggcgtgacaggaagcggaaaaaccgaaatttatctgcaatcaattgaaaaagtactggcgaaaggaaaagaagccatcgtcctcgtaccggaaatatcgctgacgccgcaaatggtcaaccgcttcaagggccgcttcggctcccaggtggcagtcatgcacagcggtttatccacaggagaaaaatatgacgagtggcgtaaaatccaccggaaggaagtacggcttgtcgtcggtgccagatccgccatttttgctccgtttgaaaatctcggaatgataatcatcgatgaagagcacgagtcttcctataaacaggaagaaatgccgcgctatcatgcgaaagaggtggcaatcaagcgggctgagcatcacagctgcccggttgtattagggagtgctacgccgacattagaatcatatgctagagcgcaaaagggcgtatacgagcttctttcactgaagcaccgtgttaaccatcgggtgatgcccgaggtttcgcttgtcgatatgagagaggagcttagaaacggcaatcgctcgatgttttcagttgaattgatggaaaagcttgaagaaacgattgccaagggtgagcaggcggtgctgtttttaaataagaggggctactcttcctttgtgatgtgcagggattgcggctatgtcccgcaatgcccgcactgcgacatttccatgacgtatcatcgttacggccaaaggctgaaatgccattattgcggacatgaagagcctgttccgcacacttgtcctgaatgcgcaagcgagcatatccgctttttcggaacgggaacacagcgagtggaggaagagctgacaaaagtgctgccaagtgcgagagtgattcggatggatgttgacacgacatcacggaaaggcgcccatgaaaaattactgtcagctttcggagaaggaaaagcggatattcttctcggaacgcaaatgatcgcgaaagggcttgattttccgaatgtcacgcttgtcggagtgttaagtgctgatacaacacttcatattcctgatttcagatcggctgaaaaaacatttcagctgttaacgcaagtcagcggccgggcaggcaggcatgaaaagcccggccatgtcatcattcaaacgtatacaccgtctcattacagtatccagctgacgaaaacacacgattatgaaacgttctatcagcatgaaatggcgcacaggagagagcaatcctatccgccatactactatttggctcttgtgactgtttctcatgaggaagtggcgaaagcagcggttacagctgaaaaaatcgctcattttttgaaagcaaactgcggagctgacacgaaaattctcggaccaagcgcgtcgccgatagccaggatcaaagatagatatcgctatcaatgcgtgataaaatacaaacaggaaacccagttatccgctttattgaagaagatactggaacattataaacgcgaaattgaacaaaaacatgtaatgatttcaattgatatgaatccttatatgatgatgtaagatctcacgtcttggagggtaacaaattggcagtaaaaaaggtcgtcacacatcctgcggaggttttggaaacacctgcggaaaccgtgactgtttttgataaaaagctaaaaaaactgcttgatgatatgtacgacaccatgcttgaaatggatggtgtcggactggcagcgccgcaaatcggcattttaaaaagagcggccgtcgtagatatcggggatgacagagggagaattgatctcgttaatcctgaaattttagaaaaaagcggcgagcaaaccggaattgaaggatgcttgagctttcctaacgtctatggtgatgtcacacgtgccgattatgtcaaagtgcgtgcgtttaaccgtcagggaaaaccgttcattctggaagcgcgaggctttttagcaagagccgtgcagcatgaaatggaccacttagacggtgtgctgtttacatctaaaataagtaaatactatacagaagatgaactagcggatatggaaggatgatttgatgacgagaatcgtatttatgggaacgccggatttttcagttcctgttttaagaaccctgatagaggacggatatgaagtagtgggggtcgtcacacagccggaccgtccgaagggcagaaaaaaagtactgacacctcctccggtaaaggaagaggcattgcgccacggcatcccggttcttcagccggaaaaagtcagattgacagaagaaattgaaaaagtgctggcattaaagcctgacctgattgtaacggcggcattcggacaaattttgcctaaagagcttctcgacagtccaaaatacggctgcattaacgttcacgcatcccttttgccggaactgcgcggcggtgctccgatccattattccattctgcagggaaagaagaaaaccgggattaccattatgtatatggtagaaaaattggatgcgggcgatatgatctcaaaagtggaagtggacattgaagaaaccgacaatgtcggaacactgcacgataaattaagcgttgctggcgcgaagctattgtctgaaacggttccaaacgttattgccggcagcatatcacctgaaaagcaggatgaagagaaagcgacgtacgcgcctaacattaaaagagagcaagagctgctcgactggtccagaacgggcgaagagctttacaaccagatccgcggcttaaatccatggcctgttgcttatacgactctaaacggacaaaacttgaaaatatgggcgtcgaaaaaaatagcggcaccaacaacagctgagcccggcacagtcgttgcagttgaaaaggaaggaattatcgttgcctcaggtaacgagacggctctgttattaaccgaactccagccggcaggcaaaaaacgaatgaaaggcgaagactttgtgcgaggcgctcatgttgaagccggtgatgtgttaggagtaaacaatgaaaaaaactagtgttcgtgacatcgcccttgaggcgctgatcaaattagaacaaaaccaggcatacagcaacctgctgctgaaatcggtcattaaatcaaatgaactgagtgatcaggacagagggcttttgactgaacttgtctatggtacattacaaaataagatcgcgcttgattatatgcttaaaccgtttatcaataagcctcaaaaggtaaagccgtgggtgattcagcttcttcgcctatccttatatcaaatggagtatttggagaagattccagacagggcagccattcatgaagcggttgagattgctaaaatccgtggacacaaaggcattgcttcatttgtcaacggcgtgctccgttctattcagcgcgaaggtgttccatcctttgacgcgatcgaagatcctgtccgccggctggcgacagaaacaagccatccggaatggcttgtgaaagagtgggcggatgcgtatggatttgaagctgcggaaaagatttgccgcatccatctcattccgccgaaacagacgctgcgtgtcaatcaaatgaaagcagacagagctgagctgcttgaccaaatggctgctgagggaatcgaagttgaaaaaagcgacctcgctgaagatgctgtgaagctcttaaagggaacaattgccggaactcatttcttccaaaacggcgaagtttctatccaggatgagagctccatgctcgtcgcccgcgcccttgatcctaagtcagatgaaacagtgcttgacgcgtgtgcggcgcctggcggaaaatcggctcatatcgcagaattaatgaagaacaaggggagcgttacgtcgcttgatcttcacaaacataaagtgaagctgatcaaagaagcggcagatcggcttggcctgacaatcattcatgcggaaacaatggatgctagaaaagcgggggaaacgtttgaaaacgaacagtttgaccgaatattggtcgatgccccgtgctcaggtttcggtgttatcagaagaaagccggacatgaaatacacgaaaaaacctgacgacagcgcccgtctagctgaaatccagctgtcgatcttgagggaaatcgcaccattagtaaaaaaaggtggcactcttgtctacagtacgtgtacaatggaccggacagaaaatgatgaagtaatacatgcgtttatacaagaacatcctgattttgaacccgatttgtctcttgaaaagcggctgcctgaaaaggtgagaccctttgttcgggatggaaggcttcaaatccttcctcattatttcggaacagatggtttctttatttgcagcatgagaaagaagggataagcaatggcagaacttaataaaacaaaagtaagaaaagaattgcggacagagcgtccgtctatttattcttttgaattagatgaaatcaaacaatggctgacagacaatggagagaaaccgttccgtgcagcccagatctttgaatggctatatgaaaaacgcgtatcttcttttgaagatatgacaaacctctcaaaggatctgcgtgagaaattaaacactcactttgtgttaacaacgctgaaaacggctgttaaacaaacctctcaagacggtacgatgaagtttttgtttgagcttcatgacggttataccatcgaaaccgttttaatgagacacgagtatggcaattctgtatgtgtaacgacacaagtcggctgccgtattggctgcacattctgcgcgtcaacgcttggaggcttaaaacgaaaccttgaagcaggggaaattgtcgctcaagtagtcaaagtgcaaaaagctcttgatgaaacggatgaacgcgtcagctctgtcgtgatcatgggaatcggcgaaccttttgataactttaacgaaatgctcgctttcttgaaaatcattaaccatgacaagggcctgaatatcggtgctcgccatattacggtctctacgagtgggatcatcccgaaaatttacgaatttgctgatcagcaaatgcagattaactttgcaatttctctgcacgcgccgaacacagaaatcagaagccgtttgatgccgattaacagagcatataaactgcctgatctaatggaagccgttaaatattatattaataaaacgggacgccgcatcagctttgaatacgggctgttcggaggcgtaaacgaccaggtggaacacgccgaagagcttgccgacttgctggaaggagtcaaatgccacgtgaacttgattccggtaaactacgtgcctgaacgggactatgtgcgcacaccgcgtgatcagatttttgcttttgaaaaaacgctgaaatcccgcggagtaaatgtcacaatccgaagagagcaaggacatgacattgacgcagcctgcggtcagcttcgcgcgaaggagcgtcaagacgagacgaggtgatgagggttgttaacagccttaaaaacagatacaggaaaaatccgccagcataatgaagatgatgcggggatattcaaggggaaagatgaatttatattagcggttgtcgctgatggcatgggcggccatcttgctggagatgttgcgagcaagatggctgtgaaagccatgggggagaaatggaatgaagcagagactattccaactgcgccctcggaatgtgaaaaatggctcattgaacagattctttcggtaaacagcaaaatatacgatcacgctcaagcccacgaagaatgccaaggcatggggacgacgattgtatgtgcgctttttacggggaaaacggtttctgttgcccatatcggagacagcagatgctatttgcttcaggacgatgatttcgttcaagtgacagaagaccattcgcttgtaaatgaactggttcgcactggagagatttccagagaagacgctgaacatcatccgcgaaaaaatgtgttgacgaaggcgcttggaacagaccagtcagtcagcattgacacccgttcctttgatatagaacccggagacaaactgcttctatgttctgacggactgacgaataaagtggaaggcactgagttaaaagacatcctgcaaagcgattcagctcctcaggaaaaagtaaacctgcttgtggacaaagccaatcagaatggcggagaagacaacataacagcagttttgcttgagcttgctttacaagttgaagagggtgaagatcagtgctaatcggcaagcggatcagcgggcgttaccaaattctccgcgttataggcggcgggggaatggccaacgtgtatttagctgaggatatcattctagaccgtgaagtcgcaattaaaatcctgcggtttgactatgcaaatgacaatgaatttatcaggcgtttccgcagagaagcccaatccgcatcaagcctcgatcacccgaatattgtcagcatttatgatttgggcgaggaagatgatatttattatattgtcatggaatacgttgaaggcatgacgcttaaagaatacataacagcaaatgggccgcttcaccctaaagaagcgctgaacatcatggagcaaattgtctcagccatcgctcatgcccatcaaaaccagattgttcacagagacatcaagccgcataacattttgattgatcatatgggaaatatcaaagtaacggattttggaattgcgacggcactaagttcgaccacaatcacccataccaattcagttctgggctcggtccattacttatcacctgaacaggcccggggcggcttagccacaaaaaaatcggatatttatgcgcttggaatcgttctatttgagcttttaaccggccgtattccgtttgatggagagtcagcagtcagcatcgccttgaagcatcttcaagcggaaactccttcggcaaaaaggtggaatccatcggtcccccaaagcgttgaaaacatcatactcaaggcaactgccaaagatccttttcatcgctacgaaacggctgaagacatggaagcagacataaaaacagcttttgatgccgacagactcaatgaaaagagatttacgattcaagaagatgaagaaatgacaaaagcgatacctatcattaaagatgaagaacttgctaaagctgctggcgaaaaagaagctgaagtgacaaccgcacaagaaaacaaaacaaagaagaacggcaaaagaaaaaagtggccgtgggttttgctcacgatatgcctcgtttttatcacagctggaattcttgctgtcactgtttttccgtcgcttttcatgcctaaggatgtcaaaatacctgatgtctccggaatggaatacgaaaaagccgcagggctcttggaaaaagaaggtttacaggttgattccgaggtgttggaaatctcagatgaaaaaattgaagagggcctgatggtaaaaacggatcctaaagcggataccacagtcaaagaaggcgccacggtcaccctttataagagcaccggaaaagcaaaaacggagatcggtgatgtgacaggccaaacggtcgaccaggcaaaaaaagcgttgaaggaccaagggtttaaacatgtaacggtaaatgaagtgaatgacgagaaaaacgcgggcactgtcattgaccaaaatccttcagcagggactgagcttgtcccgagtgaagatcaagtcaaacttacagtcagtatcggacccgaagacattacgcttagagacttgaaaacctacagtaaagaagcagcgtctggatatctggaagacaacggattgaagcttgtagaaaaagaagcatactcagatgatgttccagaaggacaggttgtcaaacaaaaaccagcagcaggtacggcagtaaagccgggaaacgaagttgaagtgacattctctctcggaccagagaaaaaacctgcgaaaacagtgaaagaaaaggtcaagatcccctacgaaccagaaaatgaaggggacgagcttcaagtgcaaatcgcggttgacgatgcggatcacagcatctctgacacttacgaagaatttaagataaaagagccgactgaacgaacgatcgaactaaagattgaacccggccaaaaagggtactatcaagtaatggtaaacaataaagttgtcagctacaaaaccattgagtatccaaaagatgaataacaaggagggaaaatatgcctgagggcaaaattattaaggcgctaagcggcttttactatgtactggatgaatcagaggattcagataaagtaatacaatgcagaggaagaggcattttcagaaaaaacaaaattacccctcttgtcggtgattacgttgtgtatcaagctgaaaatgacaaagaaggatatctaatggaaattaaagaaagaaccaacgagcttatcaggccgccaatttgcaacgttgatcaagcggtcctggttttctcagcggttcagccttctttcagcacggcattgctcgaccgcttcctggttctcgttgaggccaatgatattcagccgattatatgcattactaaaatggatctgattgaagatcaagatacagaagatacgatacaagcctatgcagaagactatcggaatattggttatgacgtataccttacctcctctaaggaccaagacagtttaacggacatcatcccgcattttcaggataaaacaacggtatttgccggtcagtccggtgttgggaaatcctcgcttctcaacgcgatcagtccggagcttggattaagaacaaacgagatttctgagcatttgggccgcgggaaacacacaacccgccacgtggagctgattcatacgtccggaggtttggttgcagatacaccaggattcagctcgcttgaatttacagacattgaggaagaagagctgggctataccttccctgatatcagagaaaaaagctcttcatgcaaatttagaggctgtttacatctgaaagagccgaaatgcgcggtgaaacaagctgttgaagacggagaattaaagcagtatcgctatgaccattatgttgaatttatgacggagattaaagacagaaagccgaggtattagcataatgataaaggttgcaccatctattctttccgctgattttgccgctttaggcaatgagattaaagatgtagaaaaaggcggagccgattgtattcatattgatgttatggacggccgttttgtcccgaatatcacaatcggtccgctgattgtagaagcggtccggccggtaacggatctgccgcttgatgtccatttaatgatagaagagccggatcgttatatcccggcttttgcgaaagcaggcgcagatatcctgtctgtgcatgctgaggcatgtccgcacctgcaccgtaccatccagctcattaaagagcaaggagtgaaggccggagtagttctaaacccgcatacccctgtacaagtcatcgaacatgttttcgacgatcttgatcttgttcttttaatgacggtgaacccgggcttcggcgggcagaaatttattcattcagtccttcctaaaataaaagaggttaagcgaatggcggatgaaaaaggaaaaaaagatctgttcattgaagtagacggcggcgtcaacaaagaaaccgctccgctcgtcattgaagcgggcgcaaatttactcgttgccggttcagctgtttatggccagtctgaccgcaaaaaagcaatttctgaaatcagaggaagtaaataagcagctttagaaaagagctgggcatacaatagcctaagctctttttcctgtatgcagagaaaggaatcagagatgaaaacaattaatatcgttgcgggaggcccgaaaaatctcattcccgatctaaccggctatacggatgaacacacgctttggatcggtgttgacaaaggcaccgtcactctcttagatgccgggatcattcctgttgaagccttcggagattttgacagcataacggagcaagaacgccggcgaatagaaaaagccgctcccgcccttcatgtgtatcaagcagaaaaagatcaaacagatttagacctcgcccttgattgggcgctggaaaagcagccggatattattcagattttcggcattacaggcggcagagctgatcattttttaggaaacattcagctactgtatagaggtgtaaaaacgaacataaaaattaggctgatagacaaacaaaatcatattcaaatgttccctcctggtgaatatgatattgagaaggatgaaaataagcgatatatctccttcataccgttttccgaagacatacatgagctgaccctgaccggttttaaatatcctctaaataattgtcatattacgctcggttcaacactatgtattagtaacgaactcattcattcacgaggtactttttcgtttgcaaaaggcatattaataatgataagaagcacggattaagcatgtgctttcattcaattgctaaaaacaatgaacaaggcggttacgggacgttataggaggggacaaaaatgaaattttacaccattaaattgccgaagtttttaggaggaattgtccgggcgatgctgggctcatttagaaaagattaatgcccaggggttcaaagccctctttcaccacataaaaacgcctgccacatatcggggcaggcgttcattttgttatacacgctcaactttaccggatttcaaagctcgagcagatacatatacttttttaggttttccgttcacaaggatacgaaccttttgaagattcgcgccccaagtgcgcttagaagcgttcattgcgtgagaacggttattcccagctgttgtttttttacctgtgataacgcatttacgtgccatttgtttccctcctcacttgcacaaaacatctactttttaacattcatataatcttagatgctttcgatatggatactttaaataatttaccacagctaaaaaacgtttgcaactattgtttcatcatctttcaagaaaattcacttgacatcttgcggaaacagcagcgctatagtatatgtagaggtacggccagcgattattgcctggtcttttcataatggaaaccatatagtagaatagctgtaactctatgcattcgaaggaggaactagtgtgtccattgaattaagaacgaagtacggacagattgatatatctaatgaagtcatcgcgatggttgcaggaggcgcggcggttgactgttacggcattgtcggtatggcctctaaaaaccagattaaagacggactgactgaaatccttcggaaagagaatttcagcaggggtgtccaagttcgccaagaaggagaacagatacatatcgacatgtatatcattgtcagctacggcacgaaaatttctgaagtggcacataatgtccaaacaaaagtaaagtacacagtaaatcaaaccatcggactggcagtggattctgtcaatatttatgtccaaggcgtacgagtgacgaacccgtagttaggaggagtaggattgtctatcagaacattagacggcagaacctttgccgagatgattcttgcgggagcgcagaatctgtctcaaaacgccagtgcagttgatgcactgaacgtgtttccggtgccggacggtgatacgggaacaaatatgaacctgtcgatgacttccggagcaagagaagttgaacaaatggatacggatgatatcgggaaggtgggctccgcgttatctaaagggctgctcatgggagcacgcggaaattcaggagttatcctatcccaattgttccgcggatttagcaaaagcattgaaacgaaaaaagaaattaatgcacttgagtttgccgctgcgctgcaagcaggtgtagacatggcgtataaagctgtcatgaaacctgtagagggcaccattttaacagttgcaaaagacgctgcaaaaaaagcgatgatcttagcagaaaaagaaaccgatatcactgcgctgatgattgcagtgacagaagaagcagaggcgtctttaaaccgcacccctgaattgctacctgtcctaaaggaagtaggagttgtcgatagcgggggcaaaggcctgctctgtgtgtatgaaggtttccttgcttcattaaaaggtgaaactgtacctcagaaagcagttcttccgtcacttgacgacatggtcagcgcagagcatcacaagagcgcgcaaagcatgatgaataccgaagatattgaatttggattctgtaccgaagtgatggttaggcttgatcagacaaaaagagagttcgacgaaggcacgttcaggcaagacctcagccagttcggagattctctgcttgtgattgcggatgaatcgctggcgaaggttcatattcatgctgaagagccgggaaacgtgttaaactacgcccagcattacggtgaattgatcaaaataaaaatagaaaatatgagagaacagcatacctctatcatcagtcaagaaagcaaacctgcagacaacgaaataccgccggcaaagcagccgtatggcattgtgactgtggcgatgggagaaggaatttcagacctattcaaaagcattggcgcttctgttgtgattgaaggcggccagaccatgaacccaagcactgaggatattgttgatgccgtgaagtctgtaaatgcagatacggtatttatcctgcctaacaactccaacattatcatggctgctaaccaagcggccagcgtagtggatgaacaggtttttgtcattcctgctaaaacggttccgcaagggatgtcagccctgctggcttttaacccggatcaagaagctgaagcgaacgaggccaatatgctaagcgccattcagcaagtaaaaagcggacaggtgacgttctcagtcagagatactcatattgacggtaaagatattaaaaaaggcgactttatgggcattctgaatggaacgattatcggcacttctgaaaatcagctgtcagccgcgaaaatgctgctgtcagaaatgatcggagaagatgatgaaatcgtgaccattctatatggtgaggatgcgtctcaggaagaagctgagcagcttgaagcgtttctcagtgaaaagtacgaggagattgaggttgagatccacaatgggaaacagcctctgtattcgtatatagtttctgcagaatagaagggcaatttgcccttctattcttatgtctgcttttaagtgcggcagcgctgtaacgcgcccgcttgccattttatatctgatcaattagtctagaagcaaagcgctaataagctctggttcataaggaggaatagcatgaaatacagaagcgtttttgatattatcggcccggttatgatcggtccgtccagctctcatacagcgggagctgctagaatcgggagagtggccagaagtttatttggcagagagcctgagcgcatcattgtatctttttacggctcgtttgcggaaacgtataagggccacggcacagatgtcgcgattatcggcggattgcttgattttgatacattcgatgaacggattaaaaccgctatacaaattgcagaagctaaaggaattgatatagagtttcgggtagaagacgcagtcccggtccatccgaacacagcaaaaatcaccatttctgatgaaaagggtgagcttgaactgacgggtatttcgattggcggaggaaagattgaaatcacagaattgaatggttttgagctccggctgtcaggaaatcatccggccatattagttgttcataatgacaagtttggcacaattgccggtgttgccaatgttctggcgaaattttcaatcaacgtaggacatatggaagtagcccggaaagatatcggccagcttgcgctgatgacaatagaggtcgaccaaaatattgacgaccacattctcgacgagctgtcgaaactgccgaatattattcaagtgacaaagattgctgactagcgaaaagggtcaggaggagccagttatgtttcgtaatgtaaaagaattaattgagattactaaagaaaaacaaatattgatctctgatgtgatgatagctcaagagatggaagtaacagaaaaaacaaaagaggacatttttcagcagatggatcataacctgtctgttatggaagcggcggttcagaaaggactcgagggagttacgagccaaacgggcttaacaggcggagatgccgttaaattgcaggcctatattcgatcaggaaaaagcctgtctggcccgctgattttagatgctgtatcgaaagccgttgcaacaaatgaagtaaatgcagccatgggaaccatctgtgcgacaccgactgcaggttctgccggtgtggtgcccggtacgttatttgctgtaaaagaaaagctgaatccaacaagagaacaaatgatccgctttttgtttacagccggggctttcggatttgtcgtggccaataacgcaagcatttccggcgccgccggaggatgtcaggcagaggttggatcagcttcaggcatggcggctgcggctattgttgaaatggcaggaggaacacccgaacaaagcgcggaagccatggccattacattaaaaaatatgctaggcctcgtgtgcgaccctgttgcagggcttgttgaggtgccttgcgtgaaacggaatgcgatgggcgcgtcaaatgcaatgattgccgctgatatggcattggcgggcattacaagccgtattccatgtgatgaggttatcgatgccatgtataaaataggccaaacgatgccaactgcacttagagaaacaggccagggcggtttagcggcaacaccgacaggaagagaattagagaaaaaaattttcggaggagcgctaggttcacgtgaaacaacatcagcaaactagtatagctaacattaagggtattgggccggaaacagaaaaaacattacacgaactcggtatttatgacatttctgatcttctgaattatttcccttatcgctatgatgactacgagctgagggatttagaagaagtaaagcatgatgaaagagtcacagtcgaagggaaggttcattcagagccttctcttacctattacggaaaaaaacgaaacaggctgacattcaggcttctggtcggccactatttaatcacagccgtatgttttaaccggccttatttgaagaagaagctttcgctcggctctgtggtgacggtttcaggtaaatgggacaagcaccgccaaaacatctctgttcaggagttgaaaaacgggccgcatcaagaagacaaaagcattgaaccagtgtattctgtgaaagaaaatgttaccgtcaaaatgatgaggcgctttattcagcaggcgctgacccaatatgcagactcacttcctgatcctcttccggaaaagctaagaaaaagctataaactgcctgactattatcaagcgttaaaagcaatgcaccagcctgaaacaagggaagcattaaagcttgccagacggcggtttgtttatgaagaatttttgttgtttcagttgaaaatgcaggcgttccgaaaggcggaaagagagcagacacaagggatacggcagcgtttttcaaacgaagaactcatgagatttatcaaaagcctcccgtttcccctcacaaacgcccagtcacgcgttcttcgcgaaataacagcagacatgtcttctccatacagaatgaaccgccttcttcaaggggacgttggatcaggaaaaacggcagtcgccgccattgcactgtatgccgcgatcctatccggataccaaggagcgctcatggtgccgacagaaattctggccgagcagcatgctgattcgctcgtttcgctatttgaaaaatgggacgtcagcgttgctcttttgacaagctctgttaaagggaagcggcgaaaagaactgcttgagcgtcttgcggcgggtgagattgatattcttgtaggaacccacgctttaatccaagacgaggtggagtttaaggcgctgagtctcgttattacagatgaacagcacagatttggagttgagcagcgcaaaaagcttcggaacaaagggcaggatcccgatgttctctttatgacagccactccaatcccaagaacattagcgatcacagtgttcggtgaaatggatgtatctgtcattgatgagatgccggctggacgaaagagaatcgagacctattgggtaaaacatgacatgctggatcgtatattggcatttgtcgaaaaagaattaaagcaaggcaggcaggcttatatcatctgtccgctgattgaagaatcagacaagcttgatgtgcaaaacgctattgacgtgtacaatatgctttctgatatttttcggggaaaatggaatgtcggccttatgcatggaaagctgcattccgatgaaaaagaccaggtcatgagagaattcagcgcaaatcactgtcaaattctcgtatcaaccactgttgtggaggttggcgtgaatgttccgaatgcaacgattatggtgatttatgacgccgaccgttttgggctatcacagcttcaccagctgcgcggccgtgttggacggggtgagcatcaatctttctgtattctgatggctgatccaaaatcagaaacagggaaagaacggatgaggatcatgtcggaaaccaatgacggtttcgagctgtctgaaaaggatctggaactgagaggtcccggtgatttcttcgggaaaaaacaaagcggaatgccggaatttaaagtggcggacatggttcatgattacagagcgcttgaaacggcaaggcaggatgctgcgaatcttgtggcttctgacgcgttctggaaggagccggaatacgctgtgttaagagatgaattgctgaagagcggagtaatggacggggaaaaattaagctgagtatcagaagtttttggtgttcagccagaaacaatcgttgcattccaatctatgaaattatatactactattagtacctagtcttaattgtccggatggtgtttagatatgagaagaaataagagagaacgccaggaattacttcagcagacgattcaagcaaccccctttattacagatgaagaactagcgggtaaattcggggtgagcatccagacgatacgtttggaccgcttagagctttccatacctgaactgagagaaagaattaagaacgtggcagagaaaacacttgaggacgaagtgaagtccctgtcacttgatgaagttatcggagaaattattgaccttgagctggatgatcaggcgatatccattttagaaataaaacaggagcacgtgttcagccggaatcagattgcgagaggacaccatttatttgcacaggcgaattctttggccgttgcagtcattgatgacgagctggcgctgactgcaagtgcagacatccgctttacaagacaggtaaagcagggtgaacgtgtcgtagcaaaagcgaaagtgacggctgtcgaaaaaggaagaacggttgtcgaagtgaacagctacgttggcgaagaaattgttttttctggacgctttgacatgtatcgttcaaaacattcataaaggtggagcatgcatgagaatagctgtagatgcaatgggaggagaccacgctcccaaagctgttattgacggagttataaaaggtatagaggcatttgatgatctccatatcacacttgtcggtgacaaaacaacgatagaatcacatttaacaactacatcagatcgcatcacggtgctgcacgcagatgaagtgattgagcctacggatgaaccggtccgtgccgtgcgaagaaaaaagaactcatctatggttcttatggcgcaggaggttgcggaaaacagagctgacgcctgcatttcagcaggaaataccggtgcattaatgacagccggtctctttattgtcggaagaattaaaggaattgaccgtccggcgcttgccccgacacttccgactgtttcgggagacggatttcttctccttgatgtcggcgccaatgtcgatgccaaaccggagcacctcgttcaatatgccatcatgggttctgtttattctcagcaagtgcgcggtgtcacttcaccgagagtcggacttttaaatgtcggaacagaagataaaaaaggaaacgaactgacgaagcagacgttccaaattttaaaagaaacagcaaacatcaattttatcggaaacgtggaagcgcgagaccttttagatgatgtggcggatgttgtagtaacagacggctttaccgggaatgttacactcaaaacgctggaaggctctgcgttgtcaatttttaaaatgatgagagacgtaatgacgtctactttgacatccaagcttgcagcagctgtgctgaaaccaaaattgaaagaaatgaaaatgaaaatggagtattcgaattatggcggagcaagtctttttggcttaaaagcgcctgtgatcaaggcgcacggctcttcagattcaaatgctgtattccatgcgattcggcaagcaagagagatggtcagccaaaatgtggctgcgctcattcaggaagaagtgaaagaagaaaaaacagatgagtagtctggaggtttttacatcatgagtaagattgcatttttattcccgggtcagggatcacaatttatcggcatgggaaaagagctttatgagcaggtgcctgctgcaaagcgtctgtttgatgaagccgatgaaacgttggaaacaaaactcagctcgcttatttttgagggggatgctgaagaattaacacttacatacaatgcgcagcctgctttgcttacgacaagcatcgctgttcttgagaaatttaaagaatctggcattacacctgatttcacagcaggacacagccttggtgaatattctgcactggttgcggctggcgctctgtctttcaaagatgctgtttatactgtcagaaagcgcggagagtttatgaatgaagcggtgccggctggcgaaggagcaatggctgcgattctcggcatggatgctgaagcattaaagcaagtaaccgataaagtcacagaggaaggcaaccttgtacagcttgcgaatctcaactgtcctggccaaatcgtcatttccggaacagctaaaggggttgagcttgcatctgaactggcaaaagagaacggcgcaaaacgcgcaattccgcttgaagtaagcggtccgttccattctgaactgatgaaaccggctgctgaaaagctgaaagaggtattggacgcctgtgacataaaagacgctgccgttccggtcatctcaaatgtttctgctgacgtgatgactgaaaaagcagatatcaaagaaaaacttattgagcagctttactctccggttcgttttgaggaaagcattaacaagctgatcgcagagggtgttacgacttttattgaaatcggtcccggaaaagtgctttcaggccttgtgaaaaaagtgaatagacggttaaaaacaattgctgtatcagatccggaaacgatcgagctggcaattcaaacgcttaaggaggagaatgataatgcttaatgataaaacggctattgtcactggcgcatcccgcggaatcggccgctcaatcgcccttgatctggcaaaaagcggagcaaatgttgtcgtgaactactccggcaatgaagcgaaagcaaatgaagtggttgatgaaatcaaatcaatgggcagaaaagcaattgctgtcaaagcggatgtatcaaatcccgaagatgtacaaaacatgataaaagaaacattgtctgttttttctacgattgacattctggttaataatgcgggaattacaagagacaatctcatcatgagaatgaaagaagatgaatgggatgatgtcattaacattaacctgaagggtgttttcaactgcacgaaagctgttacaagacaaatgatgaaacagcgttcaggccgcattattaacgtatcgtctatcgtcggcgtcagcggaaaccctggacaagccaactacgtggctgcaaaagctggcgtcatcggtttaaccaagtcttctgctaaagagctcgccagccgaaatattacggtaaacgcaatagcgccaggatttatctcaactgatatgacagataaacttgcaaaagacgttcaagacgaaatgctgaaacaaattccgctcgcgcgctttggtgaacctagcgatgtcagcagtgttgtcacgttcctagcttcagagggagcccgttatatgacaggccaaacgcttcatattgacggcggaatggtgatgtaagttttttctcgaaaatttcatcgtagtttctctagttttttaaaaacgaatccactataatacttgaggggaggtgaattgctatggcagacacattagagcgtgtaacgaaaatcatcgtagatcgccttggcgttgatgaagcagacgtcaaacttgaagcttctttcaaggaagacttaggtgctgattccctagatgtagttgagcttgttatggaacttgaagacgagtttgatatggagatttctgacgaagatgctgaaaagattgcaacagtcggcgacgctgtgaactacatacaaaaccagcaataagctgatgctaaaagtcccgccgaaacgcggggctttagccctttattcgtgcagttattacagcatgccgcttttacgcgcgctgtatccggtttagtcagagaagcgcggtgaacctgatgtgcctatggaggttactatgtcaaaacactcacattataaagataaaaaaaagttctataaaaaagtagaacaatttaaagagtttcaagaacggatttcggttcactttcaaaatgaaaagcttttgtatcaagcatttacacattcatcttatgtgaatgagcatcggaaaaagccgtatgaagataatgaaaggcttgaatttttaggtgacgctgttttggaactgacgatctccagattcttatttgccaaatacccggctatgagtgaaggagatttgacgaaattgagagccgcaattgtttgcgaaccgtctctcgtttcattggctcacgagctgtcattcggcgatcttgtcctgttgggtaaaggcgaggaaatgacaggcggaagaaagcgtcctgctctattggcggatgtttttgaggcatttatcggagccttgtaccttgaccaaggattagagccggtcgaaagtttcttaaaagtttatgtgttccctaaaattaacgatggtgctttttctcatgtgatggatttcaaaagccagctgcaggaatacgtgcagcgggacggcaaaggctctctggagtataaaatctccaacgaaaaaggacctgcgcacaaccgtgaatttgaagccatcgtatctctaaaaggtgaaccactcggagtcggaaacggccgttcaaagaaagaagccgaacagcacgctgctcaggaagctttagctaaattgcaaaaacaccatacgaaacaataaaatcccccttatgactcagggggatttcagtatgtatgccgtcttatttgaccaatgtttatgatagaattgaaatacttattacataaggaggatcgctatgttcctcaaacgtttagacgttataggatttaaatcatttgcagaacggatttccgtagacttcgttaaaggcgtgacagcagttgtcgggccgaacggaagcggaaaaagcaacatcacggatgccattcgctgggttctcggcgaacaatcggcacgctctcttcgcggcggaaaaatggaagacatcatttttgccgggagtgattcaagaaagcgattaaatctagctgaagttacgcttactcttgataatgatgatcatttcttgccaattgacttccacgaggtgagtgtcacaagacgtgtgtacagatcaggtgagagtgagtttctgattaacaatcagccatgccgcttgaaagatattattgatttatttatggactctgggcttggtaaagaagcattttctattatcagccaagggaaagtggaagagatcctgagcagtaaagcggaggatcgccgcagtatctttgaagaagcggccggggtgcttaaatataaaacgagaaagaaaaaagcagaaaataaactgtttgagacacaggacaatctaaatcgggtagaagatatattacatgagcttgaagggcaggttgaacctcttaaaattcaagcttcaatagcgaaagactaccttgagaaaaagaaagagctggagcatgttgaaattgcgctgactgcctatgatatcgaagagctgcatggtaaatggtcgactcttaaagagaaagtgcagatggcaaaagaagaagagcttgctgaatcgtctgctatttctgcgaaagaagcaaagattgaggatacaagggacaaaatacaagcgcttgatgagtcagtagatgagctccagcaagttttactggtaactagtgaagagctggaaaagcttgaaggccgtaaagaagtcctgaaagaacgaaagaaaaacgctgtgcaaaaccaagaacagcttgaagaagccatcgttcagttccagcaaaaagaaacggttctgaaagaagagctttcgaagcaggaagctgtcttcgaaacgcttcaggctgaggtgaagcagttaagggcgcaagtaaaagaaaaacagcaggctctcagtcttcacaatgaaaatgtcgaagagaaaatcgagcagctgaaaagtgattattttgagctgttaaacagccaggcttcgatacgcaacgaactccagcttcttgatgaccagatgtcccaatccgctgtcacattgcagagactcgcggacaacaatgaaaagcacctgcaggaacggcgtgatatttctgcgcgtaaagccgcatgtgaaacggaatttgcccgaattgagcaggagattcacagtcaagtcggtgcatatcgtgatatgcagacaaaatatgagcagaaaaagcgccaatacgaaaaaaatgaatccgctctgtatcaggcataccaatacgttcagcaagcgagatcaaaaaaggacatgcttgagacgatgcagggagatttctccggcttttatcaaggtgttaaagaagtgctgaaagcgaaagagcgccttggcggaattcgcggagcggttcttgagctgatttctacagaacagaagtatgaaacggccattgaaatagcgctcggcgcttctgctcaacacgtcgtgaccgacgatgaacaatctgcccgaaaagcgattcaatatttaaagcagaattccttcggccgggcgacgtttctgcctctttctgttattagagaccgccagcttcaaagccgtgacgcggaaacagccgcccggcattcatcatttctcggggttgcaagtgaacttgtcacatttgatcctgcgtatcgaagcgtcatccagaatcttcttggaaccgttctgatcacagaggacttaaagggtgcaaacgagcttgcgaagcttctcgggcaccggtaccgcatcgtaacccttgagggagatgttgtgaaccccggtggttcaatgacgggcggcgcggttaaaaagaaaaataactccctcctcggaagaagccgggagctagaagatgtgacgaaacggctcgctgaaatggaagagaaaacagctctgcttgaacaagaggtcaaaacccttaaacaatccattcaggatatggagaaaaaactggctgacttaagagaaaccggggaaggcttaaggttaaagcagcaggatgtgaaaggccagctgtacgaacttcaagttgccgagaaaaatatcaatacccatttagagctctatgaccaagaaaaatctgctctgtcagaaagcgatgaagagaaaaaagcgcgcaaacgcaagcttgaagaagagctctctgccgtatctgaaaagatgaaacagcttgaagaggacatagacaaactgacaaaacaaaaacaaacgcaatcctcaacgaaagagtctctttccaacgagcttactgagctgaagatcgctgcggccaaaaaagagcaggcatgcaagggggaagaggacaaccttgccagattaaagaaagagctcactgaaacagagattgcgttaaaagaagcaaaagaagacttaagcttcttaacgtcagagatgtcatctagcaccagcggcgaagaaaagctggaagaagcagcaaaacataaattgagtgacaaaacgaaaacgatcgaactgattgcattaaggcgcgatcagcgcatcaagcttcagcatgggcttgatacgtatgagcgtgagctgaaagaaatgaaacgcctgtataaacaaaaaacaacgctcttaaaagacgaagaagtcaaactcggacgaatggaagtcgagcttgataatttactccaatatttacgggaggaatacagcttgtcctttgagggggcaaaagagaaatatcagcttgaaactgatccagaggaagccagaaagcgcgtgaagctgattaaactcgcaattgaagagctgggtaccgtgaacctcggaagcatagatgagtttgagagggtcaacgaacggtacaagtttctgtcggaacaaaaagaagatttaacagaagcgaaaaataccttgttccaagtgattgaagaaatggatgaagaaatgacgaagcgctttaacgacacattcgttcaaatccgctcacactttgatcaagtttttcgctccttattcggaggagggcgagctgaactgaggctcaccgatcctaacgatctgcttcattcaggagtcgagattatcgctcagccgccggggaaaaagctgcaaaacttaaacctcctgtcaggcggagagcgtgcgcttactgctatagcgctcttattctcaatcctaaaggttcgtccagtgccgttttgcgtccttgacgaagtagaggctgcgctcgacgaagcgaatgtgttccggtttgcgcagtatttaaaaaaatacagcagtgatacccagtttattgtgattacccacagaaaaggaacgatggaggaagcggatgtgctttatggcgtaaccatgcaggaatccggtgtttccaaggtaatctccgttaagctggaagaaacaaaagaattcgttcagtaacgaggaaagaggttaaaagatgagcttttttaaaaaattaaaagagaaaatcacaaaacagacagattccgtatctgaaaagtttaaggatggccttgaaaaaacaagaaactcctttcaaaacaaagtgaatgatcttgtatcccgttaccgtaaagtggatgaggatttcttcgaagagcttgaagaggttcttatcagcgcggatgtcggttttacaaccgttatggaattaatagatgagctgaaaaaagaagtcaaacgcagaaatattcaagatccaaaggaagtccagtcagtgatttctgagaaactggtcgagatttataacagcggagatgagcaaatttcagaactgaacatccaggatgggcgtttaaacgtaatccttctggtaggtgtaaacggtgtcgggaaaacaacaacgatcggaaagcttgctcataaaatgaaacaagaaggaaaatctgtcgtacttgccgccggagacactttcagagcgggagccattgaacagctggaagtatggggagagcgtacaggagtgcctgtcattaagcagacggccggaagcgatccggcagctgtcatctacgatgctgttcatgctgcgaaagcaagaaatgccgatgtattaatttgtgatacggcagggcgtctccaaaacaaagtaaatctcatgaaagagcttgaaaaagtaaaacgtgttatcgaaagagaagttcctgaagctccgcatgaggtgctgcttgcccttgatgccacgaccggccaaaatgcaatggctcaggcaaaagaattctctaaagcaacaaatgttaccggcattgctttaacgaagcttgacggtacggcaaaaggcggtatcgtccttgcgattcgcaacgagcttcacatcccggttaaactagtcggtttaggagaaaaagttgatgaccttcaggaatttgatccagaatcctatgtgtacggactcttttcagatttagtggaaaaagccgacgattaagaaaaaggccccaacatcttggggcctttttcttttttatcttcttacttgataggcgaaatgataaaggctgttatcagtggataccagtcttgactcaccagaaaaaactctgaatgggatgatgtcatagtaatgaacggaaacagatgtgtaatacgtatagtaaccagcagctggccccaaatacattggaacctcaaatgttccgtttgcatcagttgttcctgaagcagtttgtgttgtgtttccgaccttcgtgtccgcttcaaatcttacgggcgcgtttggcactggctgtccgttttggtcgagtaatttgccgcttactgtaatattgtacttgactcgccaatattgaccttgcccgtaattgattttaccgtatacccctccatctgtgctgatatttgtgattgaggccttataaggtgcctcagcagcgtctgcttgctgtgccgggaaacctattgtaaacagggctgccagacacaacataaacaataaaccgatttttttcataaaaatcctccttaaaatagggttcatatacaatatcggaataaattggatgatatttagcgtattttggaaaaggttaatcgtcgctttgacaagataaaaacttgacagtgtcaataaaaccgtgtaaactaagttatcgtaaagggatttgacttaacaaaggggagagctcaaatgtcactcgaaaagacaacgagaatgaattatctgtttgatttttatcagtcgttgttgacgtcaaaacagaagagctatatgtcgctttattatttggacgatttctccctaggcgaaatagccgaagaatatgaggtttcaagacaagctgtttatgataacatcaaacgaacagaagcgatgcttgaacaatatgaagaaaagctgctccttttgaaaaagtttcaggagcgtaaagagatgtttaataagctgaaggagcttgcttccggttcaaaagaagaggaagaaattacagctctgattgaagcgcttgagaaattagattaggaggcggcaaactatggcatttgaaggattagccgaccgactgcagcagacgatttctaaaatccgcggaaaagggaaagtcagcgaacaagatgtaaaagatatgatgcgtgaggttcgtcttgcgctgcttgaggctgacgttaactttaaagtagtcaaagattttgtcaaaaaagtaagtgaacgcgctgtaggccaagacgtcatgaaaagtctgacgcccggccagcaggtcattaaagttgttcaagaggaactgactgagctgatgggcggcgaagagagcaaaatcgccgtcgcaaaaaggccgccgactgttattatgatggtcggtctccaaggtgccggtaaaacgacaacaagcggtaagcttgcgaatctgctgcgcaaaaagcataatcgcaaaccgatgctggttgctgccgatatttaccgcccagccgcaattaagcagctggaaacactcggcaaacagcttgatatgcctgttttttctcttggcgatcaggtcagtcctgtagaaatagctaaacaggctattgagaaagccaaggaagaacattatgactatgtcattttggatacggcaggccgcttgcatatcgaccatgaactgatggatgaactgaccaacgtcaaagaaatcgcgaatccggaagaaattttcctggttgtcgattcaatgaccggtcaggacgctgtgaatgttgccaaaagctttaatgaacagctcggtttaaccggtgttgtgttaactaagctggatggagacacacgcggcggggctgcgctttctattcgcgctgtcacaaacacgccaattaagttcgcaggtttgggcgaaaagcttgatgcgttagagccgttccaccctgaacgcatggcatcaaggattctcggcatgggcgacgtgctgacattgattgaaaaagcacaggccagcgttgatgaagacaaagccaaagagctggaacaaaaaatgagaacgatgagcttcacattggacgattttctggagcagctcgggcaagtcagaaacatggggccgcttgatgagcttctgcaaatgatgccgggtgcaggtaaaatgaaaggcctgaaaaacatccaagttgatgaaaaacagctgaatcatgtggaagcaatcattaaatcaatgactgttcttgaaaaagaacagccggatatcatcaatgccagccggcggaagcggattgcgaaaggaagcgggacatccgtacaggaagtcaaccgtctgcttaagcagtttgatgaaatgaaaaaaatgatgaagcagatgacaaacatgtcaaaaggcaagaaaaaagggtttaagctaccttttatgtaatcggttatacatgataaaaccgttgttaagaaaaaacactttacaaacacttttatcattgttaatatactatcttgttgaaatattttcggaggtgctagtaaaatggcagtaaaaattcgtttaaaacgtatgggagcaaaaaaatctcctttctatcgtattgttgtagcagattctcgttcaccacgtgacggccgtttcatcgaaacagtcggaacttacaacccggttgcaaaaccagcggaagtaaaaattgacgaagagcttgctcttaaatggcttcaaactggagcgaaaccatctgatacagttcgcaacttgttctctagccaaggaatcatggaaaaattccacaacgctaaacaaggcaagtaatgactgatcaacacttggaagatttgattgtccacattgtgacgccgcttgttgatcatccagatgacattcgcgtcataagagaagaaaccgatcaaaagattgcgctgcgcttatctgtccataagtcagataccggtaaagttatcggaaagcaaggccggactgcaaaagcgattcgaacagctgtatttgcagctggcgcacagtcttctaagaaagttcaatttgaaatatttgactaaaagggagagggccggcacctcccctttttttacacgcaaaaaaagggtaaactgatagaagcttaggcaaaatagaaaagcctgggcgagtaaaagttttaaaagcggggagcttggtgcgatgcaaattattcaccgtgtagccgttatgcaagtcttaaccgagcgcagtaaagaaaagcttttagcttcttttgccgaaaagaaacaaatgcttgaacgagaatgcagccagctctattttcagcttagaaaacatgagaaagaacagcaaaaccctgatatgatagaacaatttaaaaaggcaatagaaaagcgaaaagatgatatgaaaatcatcgattttcaaattgctcaagtacatacattgcagcttggcagtgagttgaaagaaaaggaagtcgatgcgctgctgacgattgaagccggggatgactggcatgagaaaacagcagcgaacaccatcgtcataaaagacggaaaagtaattgaaattcgccagaggtgatcatatgacaaagcgatggtttaatgtaggcaaaatcgtaaatacccacggaatcaaaggcgaagtgcgggtgatttcaaaaacagattttgccgaagaacgatacaagccgggaaacacgctgtatttgtttatggacggccgtaacgaaccagtggaggtaacggtaaacacacatagactgcataagcaatttcatctcctgcagtttaaagaaagacaaaacctaaatgaagtagaagagctgaaaaacgcaatcattaaagttcctgaagaagaattaggagagctgaatgagggtgaattttatttccacgaaattattgggtgtgaagtatttactgaagaaggcgaactcatcggaaaggtcaaagaaattttgacgcctggagccaatgacgtttgggtcatcggacgaaaaggaaaaaaagacgcactcattccttacattgaatcagtggtcaaacatatcgatgtcagggaaaagaaaattgagattgaactcatggaagggttaatagacgaatgaaaatcgactttttgacgctgtttcccgaaatgtttgaaggcgtgctcggctcatcgattcttcaaaaagcccaggaaaaagatgcggtgcagtttcaagtcgtaaatttccgggagtactctgataacaagcacaatactgttgatgattatccttatggcggcggggcaggcatggttctcaagccccagcctgtttttgacgcggtcgaggacctgacatcaaaggcagccgctgctccgcgtattatcctcgtatgcccgcaaggtgagcgttttacccaaaaaaaagccgagcaattagcaaaggaagagcatttgctgttcatttgcggccattatgaaggctatgatgaacgcattcgcgagcacttggtaacggatgaaatatcaattggcgactttgttctgacgggcggtgagctccctgcaatgatgatcgcagacagtgtggtcagactgcttccgggtgtactgggtaaagaggcttcccatattgaggattccttcagcaccggacttttagagcacccgcattatacaagaccggcagattacaaaggtttaaaagtgcctgaaacactcttgtcaggaaaccatgcaaaaattgaagaatggcggaataaagaatcgatcagaaggacctacctaagacgtccggatctgttgaaagactacccgcttacagagcagcaaagaaagtggatttctgaatgggaaaaagaatagattttattgcataggctatgaaattgtgataagatactacttgtggcttaagcgggcttatccgctgcaagcttgaaaacgatgttccgctgtgccggtttttgtggccaagagcatctgttggaaggagttgaaaacgatgcaaaaactaattgaagatatcacaaaagaacagcttcgtactgatcttcctgcgttccgtcctggtgacactttacgtgtacacgttaaagttgttgagggtaaccgtgagcgtatccagatctttgaaggtgttgtgattaagcgtcgtggtggtggaatcagcgaaacgttcacagttcgtaagatttcttacggtgttggcgttgaacgtactttcccagtacacacaccaaaaatcgcgaaaatcgaagttgtacgttacggtaaagtacgccgtgctaaactttactacctgcgtgaacttcgcggaaaagcggctcgtattaaagagatcagacgataatgataacgaacgaaaagagcttgttacctgtaacaagctctttttttatacagaatttgaaaatgccggacaggcatcgtaaaatacataaaggacaacaatgaatcatgcatactgaagataaaggcggtgttcgtgtcacatgacaattcaatggttcccgggccatatggcaaaagcaagaagggaagtaaccgaaaaattaaaattaatcgatatcgtatatgaattggtagatgccagaattccaatgtcatcaagaaacccaatgattgaagatattctaaaaaacaagccgcgaattatgctgttaaacaaggctgacaaagcagatgcggcagttacacagcagtggaaagagcactttgagaagcaggggatccgctctctgtctattaattctgtaaatggacaagggttaaatcaaattgtgcctgcatcaaaagagatcctccaagaaaaatttgaccggatgcgtgcgaaaggtgtgaagccgagagcgattcgcgctttgattatcggcattccaaacgtcggaaaatcaacactcatcaaccggcttgcaaagaaaaacatagcaaaaacgggagacagacctggtattacaacctctcaacagtgggtcaaagttgggaaagaattagagctattagatacaccgggaattttgtggcctaaatttgaggatgagcttgtcggtttgagactggcagtcaccggggctattaaagactcgattatcaatttgcaggacgtggccgtgtttggtcttcgttttctcgaagaacattacccagaacggctcaaggagcgttatggccttgaggagatcccagaggacattgccgagctgtttgatgcaataggtgaaaagcggggctgtctcatgagcggcgggctcattaactacgataagacgactgaagtcatcattcgcgatattcgcactgaaaagttcggcaggctgtcatttgaacagccgacgatgtaaaggcgcgcagaaatgcgggtctttattttttcttggctgaaccgatacatacagtaagggagaagagaaagtgaatacattaaccgtaaaggacattaaagaccgtttgcaggaagtgaaggatgcacaagacccatttatttcccaatgcgaaaacgacccgagaaaaagcgttcaaacgcttgtagagcaatggcttaaaaagcaagcgaaagaaaaagcgctgaaagaacaatgggtgaatatgacttcctatgaaaggctggcaagaaacaaaggatttcgcttgattgcaggtgttgacgaggtcggccgggggccattggcaggaccagttgtcgccagcgcagtcatccttccagaggaatgtgaaatacttgggctgacagactccaaaaagctttcagagaaaaaacgcgaggaatattacgagcttattatgaaggaagcactggcggtcgggataggaattgtagaagctactgtgattgatgagatcaatatatatgaagcttcaaaaatggcaatggtgagagcgatacaggatttgtcggatacacctgattatttgcttgttgacgcaatgacacttccgctcgacacggctcaggcgtcaattataaaaggcgatgccaaaagcgtgtctattgcggcaggtgcgtgtatcgcaaaagtgacgagggaccgaatgatgagcgcttatgccgaaacgtatcccatgtacggctttgaaaaaaataaaggctatgggacaaaagaacatttggaagctctcgctgcatacggcccaactgaattgcaccgcaaaactttcgctcctgttcaatctttcagataaatcaccatggacaaggaggcacctttttaaaatgaacatacgaaatgatgtgcaaaaggcgctgcagcaccttttcgggcgtacagccgtcccgcaggaaacatcaaaagtaaacgaagcgctaaacggggagaagcgtctcctcttaggaaaagtgcttcgtttactaggagatcagcatgccctgatccaagtcggcaatcaaactgttcagggaaaacttgaaactcagcttcgtcctcaggcatactattggttttcctacgaaaaaaaaacggcagagcaaacaggccgtcttcaggtcgttcaaagctttgatcaaaatcctaaaaccattcaggatgcagctggcaaacttttaaatgctatttcagtgaagacgtcaaacgcagctctcatgatgacaggagcgatgctgaaaagcaaaacacccgtaacagaaaatgatatcaaaacagctgtccgctggatggacacgctgccttcgcaagacacaaaaaaagcagttgaaacggttctcttcgctttaaagcgtgatcttcccattcactccgagattttgaatggtgttcacgctgtgaaatcgcctgttccgttgcatcagcacgtatcccagctgctacaggcaatcgaccaaaaccctcagcagagccaaatgatgtcaaagctaaaggaagcagttacggtgcttttaaatagtgaaatcgatgtccatgcagaacggctgattgataagcttatttctttaaccgacaatacgaaagcaccttctccgacgaatacagctggaagcagggagcttagcacaccagctggctcccccggaaaagccagcctgccgattgcaaatcacacagcagaacagggaagcatacaagaagagcctgttaaaacagcagcagacattccaattaaagaagcccgccagctgctcgtgaagctgacggaatctgctgaaaaaaacagtctccaaattgtgaaagaagcagcaaattggattaaagcggctgcttcatcgggtgatagtaagtcacttgcagcttcagctgttttacaagcggcacaagtcacagaccaggaagccgaagtctttttaaaggctgttcagcagacagcaccccatttggcggataaggcagatgttctttctttcttatccaaagtgaaaacggcaatcggcgcaagggacgaggttgcgttcattaaagcgtttgaacaaggaagcgcagtcacatctggcgaaatgcaatccatcaagctggctctttctgccttaagagcatcgcatgaggtagccgaaccagtcaaacaagaagccgatcagctttttcataaattaaatggccagcttttcatgcagcaggaccatccatcatacagccaaattgtaatgtcatttccgatgttttcgaagtcaggggttcaggacatgactgttctgtttaaaggaaagaaagaagcggatggaaagcttgatccttcccattgccgccttttgtttttgctgcagcttgatacactaaaagaaaccgtcgttgattgcttggtacagcaaaaagtcatgaccattacaatagagactgatttcgagctgcaggctgcgatcgatccgatggtgcccgcgcttaaacaggggctaaaggaaatggggtacagcctttcaggggtaaacgctaaaaaaagggttcacaccgaagaaaaggcttcaatcgatcaatatataacaagtatcagtgatcaggaagtggatgtgaaaatatgaaagagcagacaccgatcagaaaagctgttgctctccattatgacgaacaaaaagacaaggcgccgagagtgattgccacagggaagggccatgtagctgacaacattatcaaagaagcgaaaaaagcaggggtcccgattcaagaagatcggacccttgtcgaattaatgcgccatttgacggtagatgatcaaattcctgaagctctttatgaaacggtagccgagattttttcattcatttacaaattggacgaaagcgtaaaaaacgaaaaatagctaaaatattccccatcctcctttgaaatttatgtttttaataaagtaaaagtttgaatgtttagaaggattaaaagattttgcatcgaactgtagacaattcttccagtattattatagaatgaaagcgcagtctattttagttttgttacataagttaggaggatgggaaatgaatatccatgagtaccagggaaaagaagtcctcagaaaatatggggtatctgttcctgaaggtaaagtggcttttacagcagaagaagcagttgagagtgcaaagagcttatccagctcggtttatgtcgtaaaggctcaaattcatgctggcggtcgaggcaaagctggtggggtaaaaatagcaaaatcattagacgaagtaaaagcgtatgccgaagaactattagggaagaccctagttacacatcagacgggtccggacggccaagtaataaaacgcttacttattgaagaaggctgcgatattaaaaaagaatattacatcggtctagtgcttgaccgcgccacttcaagaatcgttttgatggcttctgaagaaggcggaacggaaattgaagaggttgcggagaaaacaccggaaaaaatcaaaaaagctgtcattgatccggctgttggccttcaaggctatcaagccagagaaattgcattcgctattaatattccaaaagagctcgtgggaaaagctgctaaatttatgcttggactatataaagcgtttgttgagaaagactgctcaatcgccgaaatcaatccgcttgttgttaccggcgacggaaatgtgatggcgcttgatgcaaaattgaattttgacagcaatgcgttgtaccgacaaaaggacattatggaatacagagatttggatgaagaagatccgaaagaaattgaagcgtccaaatatgatctaagctacatttcccttgatggaaatatcggctgtatggtaaacggcgcggggcttgcaatgtccacgatggatattatcaagcattatggaggagaaccggccaacttccttgatgtgggcggcggtgcaaccgctgaaaaagtcacggaagcatttaaaatcattctttctgatcaaaacgttaaagggatttttgtcaacattttcggcggcattatgaaatgtgatgtcatcgcagaaggggttgttgaagcgactagacaagttggtttgacattgccgcttgtcgtccgtcttgaaggcacaaacgtggatctagggaagaaaatccttagtgaatcaggattaaacattacatctgcggaatcaatggctgacggcgcgcagaaaatcgtatccttagtttaagaaagaatgaaaggcaggggaccaaataatgagtgttttcattaataaagatacaagagttattgtgcaagggattacaggttctaccgctttatttcatacgaagcagatgcttgaatacggcacaaatatcgttggcggtgtaacacctggaaaaggcggaacagaagcggaaggtgttcctgtatttaatacagtggctgaagcagttcaaacaaccggcgctaacgcgtctgttatatatgtgcccgcaccgtttgcagctgatgcgattatggaagcggtagatgcggagcttgatctcgtgatttgtatcacagaacatatcccggttttggatatggtgaaggtcaaacgcttcatggaaggcaagaaaacgagactgatagggccgaactgtcctggtgtcattacgcctgaagaatgtaaaatcggcattatgcccggatacatccataaaaagggtcatgtaggcgttgtatcacgttcaggaacattaacatacgaagcggtgcaccagctctcagaagcgggtgtagggcaatctacagctgtgggaatcggcggcgaccctgtaaatggaacaaactttattgacgttttaaaagcgtttaacgaagatcctgacactcacgcagtcatcatgattggcgaaatcggcggtactgccgaagaggaagcggcagagtgggtaaaagccaacatgacaaaaccggtagtcggttttatcggcggtaaaacagcacctcctgggaagcgcatggggcatgcaggcgccattatttccggcggaaaagggacagctgatgaaaaaatcaaaacccttaatgcatgcggaatcgaagttgcagagacaccttctgtcatgggtgaaaccttaatcaaggtgctgaaagagaagaacttgttcgaaacttgcaaaacgcattaataaaaaagggacagccgtcaaggctgttcctgctttttctaacaaaaggaggtcaatctattggatcaggccgctgcctgcctaacgatttgcagaatcaatcaattattatccccatcccttctattaaaatggtggaaagccgatccgtctatgtcgctgacatcacccgtgttacaaacggttactcgtgatcaaataaaagcagctgcattaaaaaacgaaatagaacaattttatccaaagctcccgcgtgtacttgctgcttatcgtgagcaaggcattaacaccatccctatttcttcaaagcaatatcctttctggcttaaaagcatttatgatccccctgccgtactgtttgcaaaaggtgatatgactcttctttcgaaagggagaaaaattggaattgtagggacaagaaatccaacagcttatgggaaacaagttgtcaatcatcttacaaaagagatctgtcgtaaaggttgggtgattgtcagcggactggcgtctgggatagacggaatgtcccatgctgcaagtattaaggcgaaggggcggacaattggcgtcattgcaggcggatttcaacacatttatccccgagaaaaccttcagttagcagatcacatggctaaacaccatatcctgctgtcagagcacccacctgaaactaaaccccaaaaatggcatttccctatgagaaaccgtattatcagcggactaagtgaaggcgttattgtcgttcagggcaaagaaaaaagcggttcgctgattactgcctatcaagcattggaacaagggagagaggtatttgccgtacccggttcattgtttgacccttacgccggaggtcctataaaactgatccagcagggggctaaagccatatggtcagcagaggatattttcgaggaacttcctgagagaaacgttcaatatacggaacccttttgaattatcgtttgacaaacggtattgtaatatttaataatagtgaggatttaaagttgcatattgttttctatttaattaatgacgttcatgataaagaatgaaatgttgaaagccaaataaagacagctgcaaaaataaaattgaaatatcttgaaaagagagagaacacctcttgagggggatgaaaatgtctgattatctagtcatcgtggaatcgcccgctaaggcgaaaacgattgaacgttacttaggtaaaaaatataaagtaaaagcatcaatgggacatgtccgggatcttccaaaaagtcaaatgggagttgacatagaacagaattttgaaccgaaatatattaccattcgaggtaaaggcccggtattaaaagagctgaaaacggctgcgaaaaaagccaaaaaagtgtatctcgcagccgaccccgacagagaaggggaagcgattgcatggcatttggcacacagtcttgatttagatctcaactcagactgccgtgtggtgtttaacgaaattacaaaagacgctattaaggaatcgtttaagcatccccgcatgatcaatatggatttagtggatgcacagcaagcgagacgtattttagacaggcttgtcggatataaaatcagtccaatcttatggaaaaaagtcaaaaaagggcttagcgcaggacgcgtgcaatccgttgccctccgtttgattattgaccgtgaaaaagagattaacgactttaagcctgaggaatattggacaattgacggtacgttcttaaaaggtcaagaaacctttgaagcgagctttttcgggaaaaacggcaaaaaacttcctttaaatagtgaagctgatgtaaaagagattctttctcagctcaaagggaatcaatatacagttgaaaaagtaaccaaaaaggaacgcaaacgtaatcctgctttgccttttaccacttctaccctgcagcaggaagcggctcgcaagctcaatttcagagcgaagaaaacgatgatgattgcacagcaattatatgaaggaattgatttaggaagagaaggaacggttggtctgatcacgtatatgagaacggattcaacccgtatttcaaatacggctgttgatgaagcagctgcatttattgatcagacatatggaaaagagttcctaggcggaaaacggaagcctgcgaaaaagaatgaaaatgcccaggatgcccacgaagcaattcggccgacatcagttcttagaaaaccaagtgaattaaaagcagtcctcggcagagaccaaatgagactgtataaattaatttgggagcgttttgttgccagccaaatggcaccggctgttctcgatacaatgagtgtcgacctgacaaacaacggtttgacatttcgtgcaaatggaagtaaagtcaagttttccgggtttatgaaggtgtatgttgaaggaaaagacgatcaaatggaagaaaaagaccggatgctgcctgacttacaagaaggcgacacggtattatcaaaagatatagaacctgagcagcattttacccagccgcctccgcgatatactgaggcccggcttgttaaaacccttgaagaacgcggtatcggccgtccatccacatatgctccgacacttgatactattcagcggcgcggctacgtggcattggataataaacgtttcgttccgactgaattaggtcagatcgttcttgacttgatcatggagtttttccctgagatcattaacgttgagtttacagctaaaatggagagagatcttgatcatgttgaagaaggaaataccgaatgggtcaagattatcgataatttctacaccgattttgaaaaacgcgtcaaaaaagccgaatcggaaatgaaggaagttgagattgaaccagagtatgctggagaggattgtgaattgtgcagttctccaatggtatataaaatgggacggtacggtaaattcttagcttgctccaacttccctgactgccggaacacgaaaccgattgtgaaacaaatcggtgtgaagtgcccgagctgcggagaaggaaacattgttgagcgaaaatcgaaaaagaaacgggtgttttacggctgtgaccgttatccggactgtgaattcgtatcatgggacaaaccaattgaacgaaaatgcccgaaatgcggaaaaatgctcgtcgagaaaaaactcaaaaaaggtatacaagtccaatgcgtggaatgcgattataaggaagaaccacagaagtagcggtgagcagggtcttgctcaccttctttgtgtgttaaaagaaggccttgaataataaaataggagatgtgaaagatgaaccaacaaacagtgaatgtaatcggagccggactcgcaggaagtgaagcagcatggcagcttgccaaacgtgggattcaagtcaaattgtatgaaatgcggccagttaaacaaacgcctgcgcaccatacagataaatttgctgagcttgtctgcagcaactctcttcgctctaatacacttgctaacgctgtcggtgtattaaaggaagaaatgcgtgcgcttgattcagccattatcgctgcggctgacgaatgttcggtgcctgccgggggcgctcttgcagtagaccgtcatgaatttgccgcaagtgtgacaaatcgggtgaaaaatcatccaaacgtaaccgttattaatgaagaagtgactgaaattcctgaaggccctactatcatcgcaacgggtccgttaacatctgaatcgctgtctgcccagctgaaggagctgactggagaggactatttatatttttatgacgcagcggcgccaattgtagaaaaagacagccttgatatggataaagtgtacctaaaatcccgttatgataaaggtgaagcagcatatttgaactgcccgatgacagaagaagagtttgaccgttttcatgaagcattaacatcagcagaaacagtgccgttaaaagaatttgaaaaagagattttctttgaaggctgcatgccgattgaagttatggcaaaacggggtaagaaaacaatgcttttcggtccgatgaaaccggttggtctagagcatcctgttacaggaaaacgcccttatgccgtcgttcagctcagacaggatgatgctgcgggaacactttataatattgtaggattccagactcatttaaaatggggagaccaaaaggaagttctcaagttgattccaggacttgaaaatgtagaaatcgtcagatatggcgtgatgcacagaaacacatttattaactctccaagcctgttaaagccgacttatcaatttaaaaaccgcagtgatctgttctttgcaggccaaatgacgggagtagaaggatatgtggaatcagctgcctcaggacttgtagcaggcattaatgcggcgaagcttgtattgggagaagagcttgtgatcttccctcaggaaacagcaattggcagtatggcacattatattacaacaacaaaccagaagaacttccagccgatgaatgcaaactttgggcttttgaaagaattgccagttaaaattaaaaataaaaaagaacgaaatgaacaatacgcgaaccgtgcgattgaaacaattcaaacaatttcgaaaacaatataggtattgattgcaacctgagcgcgatttgtgataccatttaaaagcccttcctggggaggtattaggcatggagaatgttaagaatttcgtaaagttattcgttgaatatttacaaattgaaaaaaattattcacaatatactattgtgaattatgtggattcaattgaagaattcgagactttcctgcgcgttcaaggtataaatggatttgaagaagctgcatatcaagatactaggatttttttgacagaagcctatgaaaaaggtttatcgagaagaacaataagcaaaaagatatctgcattaagaagcttttataagtttctgatgcgggaaaagcttattgaagaaaatccgtttcagcttgttcatctgccaaaacaggagaaacggataccgaagtttctatatcaaaaagagcttgaggagctgtttgaagtttcagatataagccagccggccggaatgagggatcaagcgctgttagagctgctctatgccaccggaatgagggtcagtgaatgctgttccataactattaacgacgttgatttatttatggacactgtgcttgttcacggtaaaggcaagaagcagcgctatatcccctttgggtcttatgcccgcgaagcgttgaaggtatacatgaatagcggaagacagtgcttgctgatgaaggcaaaagaacctcatgatctattattcgtaaatcaaagaggcggaccgcttacagcccgtggcatcagacatattttaagcgggcttgttcaaaaagcgtcaagcactttacatatccatccgcatatgcttcgacatacgttcgccacgcatctgttaaatgaaggagcggatttgagaagcgttcaagaactgctcgggcattccaatctgtcttctacacagatatacacgcacgtttcgaaggaaatgttgagaaacacatatatgtctcaccatccaagagcatttaagaaaaattaaaggaggccctttatgtcatcttttcatgcgaccacaatatttgccgtacagcataaaggacgaagcgctatgtccggagacggccaagtaacatttggtcaggctgttgtcatgaaacacacggcacggaaagtgagaaaactgtttaacggcaaagttcttgctggctttgcgggatctgttgcagacgctttcactttattcgaaaagtttgaagctaagcttgaagaatataacggcaacttaaaacgggcggctgttgagcttgcgaaggaatggcgcagtgataaagtgctaagaaagctcgaagccatgctgattgttatgaatcaggatactttgcttctcatatcgggaacaggcgaggtgatcgaaccagatgacggcattctcgcgattggatcaggaggcaattacgctttggcagcgggaagagcactgaaaaagcatgccggtgaaagcatgtctgcaagtgagattgccagagccgcgttagaaacagcaggcgaaatttgtgtttacacgaacgatcaaatcatactggaagagcttgaatagaaaggacttgaggcgcatggaaaaaaaaccgttaactcctagacagattgtagatcggttagaccaatatattgtcggtcagcaaaatgcgaaaaaagctgtcgccgtggcattaagaaaccgctatagaagaagtcttctggatgaaaagctgaaggacgaggtcgttccgaaaaacattttaatgatgggtcctaccggcgtcgggaaaactgaaattgccagacgaatcgctaagctttcaggtgcgccatttatcaaaattgaagcgactaaatttaccgaagtcggctatgtaggcagagatgttgaatcaatggtcagagatcttgtggagacttctgttcggcttataaaagaagagaaaatgaatgaagtaaaggaacaggcagaagaaaatgcaaacaaacgcattgttcgtctgttagttcctgggaagaaaaaacaatctggcgttaaaaatccgtttgaaatgttttttggaggcagccagccgaatggtgaagatgaggcggagagccaggaagaagcaaacatcgaagaaaaaagaaaacgaatggcacatcagctggctttaggagagctcgaagactactatgtaacagtagaagtcgaagagcagcagccttctatgtttgacatgctgcagggctcgggtatggagcagatgggtatgaacatgcaggatgcgctgagcggattaatgccaaagaaaaagaaacggcgcaaaatgacagtcagagaagccagaaaagttctgacgaatgaagaagcaagcaaactcatcgatatggatgaagtcggccaggaagcagttcagagagcagaagagagcgggattatctttatcgatgagattgataaaatcgcaaagaacggcggtgcatcttcttctgccgatgtttcaagagaaggcgttcagcgggatatccttccgattgttgaaggttctaccgttgtcacaaaatatggttctgtaaaaacagaccatgtattatttattgcagcaggagcgtttcatatggccaaaccgtctgatttgattcctgagctgcaggggcgtttcccaattcgtgtagaactgaacaaactcacggtagacgacttcgtgagaattttggttgagccggataatgcgctgctgaaacaatatcaggcattattgcagacagaaggtatatctcttgaattttctgacgaagctattcataagattgctgaagttgcttatcatgtgaaccaggacacagataatatcggtgcgagacgccttcatacaatacttgaacgcctattagaagatttgtcgtttgaagctccagatgtaacgatggagaaaataacgattacaccacagtatgtcgaagaaaagctcggaacgatagccaaaaacaaagatttaagtcaatttatattgtgaaaaatttaatatgaggaatgtttaggaggattatttatcatggctttattacaaaaaacaagaattattaactccatgctgcaagctgcggcagggaaaccggtaaacttcaaggaaatggcggagacgctgcgggatgtaattgattccaatattttcgttgtaagccgcagagggaaactccttgggtattctattaaccagcaaattgaaaatgatcgtatgaaaaaaatgcttgaggatcgtcaattccctgaagagtatacgaaaaatctgtttaatgtccctgaaacatcttctaacttggatattaatagtgaatatactgctttccctgttgagaacagagacctgttccaagctggtttaacaacaattgtgccgatcatcggaggcggggaaagattaggaacacttattctttcacgtttacaagatcaattcaatgacgatgacttaattctagcagaatacggcgcaacagttgtcggaatggaaatcctaagagaaaaagcagaagaaattgaagaggaagcaagaagcaaagctgtcgtacaaatggctatcagctcgctttcttacagtgagcttgaagcaattgagcacatttttgaggagcttgacggaaacgaaggtcttcttgttgcaagtaaaattgctgaccgtgtcggcattacccgttctgttattgtgaacgcactcagaaagctggagagcgccggtgttatcgagtctagatcattaggaatgaaaggtacttatatcaaggtactaaacaacaaattcctaattgaattagaaaatctaaaatctcattaatcacaaaaagaaccctttttgagggttctttttttatttcaaataaaggaaatcaataagctttatttcctgggttgaaagtctttctatgtaataattttaataaattttgcatttttcttcaaaaagtttcaaaaatgccgaaaagaaaggagaaaaaacagaaattctgctattttcaggcttatatcaaggcgagaaatgtagttctaacaatctaggactttatacctagttgcaaaatagataattgtgaggacatttttttacacgaacttcatagactttatgcctgttatttcttacaataagcatatagttttacaattctcgacaaggatattgagggtgaaaaaaactgaaatggaggtaagtggatttgagcttattttctggaacgatacaaaatcttgaaaatgccttgagtagagcggatattaagcaaaaagtcataactaataatatcgccaatatagatacaccgaactataaggcaaaaaaagtctctttccaaaatttattagatcaagaatcctcgcgtcttgaagcgataaaaacagactatcgtcatgttgatttttctgatactgattcgaattattcaattgttgcgagcggagatacatcgtatcagcaaaacggaaacaatgttgatgttgacaaagagatgacagaattggcgcaaaatcaaatcaactatcaagctttggttgaaagaatgaacggtaaatttaattcgctgaagaccgtattaacaggaggaaaatgatgacagcttttcatagcttaaatgtttcagcatcggctttaacagctcagcgagtcagaatggacgttgtatcatctaacttagcaaatatggatacgacaagagctaagcaggtgaatggagagtgggtgccttacagaagaaaaatggtttcccttcagtcaaaaggtgaatcgttctcttctattctcaattctcaaatgagcggaagcgggaatgctggaaacggtgtgaaggtttcaaaaattacggaggatgattcagattttaatcttgtctatgatccgacagaccctgatgcaaacgctgaaggatatgtacaaaagcctaatgttgatccattaaaggaaatggttgatcttgtcagcagcaccagatcatacgaggcgaatgtcacggcgatgaatgccacaaagggaatgctgatgaaggcgttagaaatcggaaagtaggtgaatgaatgtgattaatgcaatttctccttttcaggttcaaaatactcaaaacactcaaaatgcaacaaatcaagtaaacaatagccaaaaaacagattcttcaaatcaaacaagcttttcggagcttttaaaaaactctattagttcgttaaatgagtcccaagtagcttctgacaacatgactaatgccttggctgcaggaaaagatgtaaatcttgatgaggtcatgatcgctgctcaaaaagccagcatctctctaactgcagcaacagagttccgcaataaagctgtggaagcttatcaggagattatgagaatgcaaatgtagggggtctgacgatttagagaaagagtggaatgaccgggggttaacatgaatcgtactctaatgcaaatgaaaaacaaaacgagtgagttttggaaaaatagatctaaattacaaaagattttaatggttagtgctttagcggcaattattattattggaattattattagtgtttttgcttcgaattctaaaatggcgccgctgtacaaagatttgtctgccgaagaagcaggacaaatcaaagaagaattggatgcaaaaaaagtgccaaacgaactttcgaatggcggtacagtgattagtgttccggaggatcaggttgattctttgaaagtgcagatggctgcagaaggacttcctaaaacgggatcaattgattattcgttttttggacagaatgccggctttggtttgacagacaatgagtttgatatggtgaaagtgaaagctacacagacagaactgtcaaacttgatcaatgaaatggacggtattaaaaattcaaaagtaatgattaatctcccgaaagacgctgtgtttgtcggtgaggagcaatctgcagcatctgcatcaatcgttttgcagattcaaccgggttatacacttgatcaaagccaaatcaacggattatatcatctggtatctaaaagcgtgccaaacctaaaagaagataacatcgtcatcatggaccaaaattctacatactacgacaaatcagacagcgatgcagggtcctacgcggatagttattcttctcagcaaggaattaagtctcaagttgaaaaagacattcaaaaacatgtacagtcattgctgggtacgatgatgggccaagataaagtcgttgtctccgttacagcagacattgatttcacaaaagaaaatcggacagaagacattgtcgaacctgtggataaagaaaacatggaaggcattgcagtcagcgctgaaaaggtatctgaaacatatcagggcgacggtgcagccaacggcggaactgccggaaccggcgaggaagatgtaccaaattataaggctgacggtgaaaataccgaaagcgggaactatgaaaaaaacagcaacaaaatcaattacgaggttaaccgaattcataaagaaatcgctgaaagtccttataaggtcagagatttagggattcaagtaatggtagagccgcctgatgccaaaaacacagcgtcgctatcaactgaaagacaggatgatatacaaaaaatcctttcaactgtagtcagaacatctttggataaagatgaaacgcaaaatcagaatttatctgatgctgatatcaataataagattgttgtttccgttcagccattcgacggaaaagtcaatttggatacaaatacggaaaaatcctctggtatcccgctgtgggcatatattgtaggcggtgttttaatcgcagcgattattgttctgatcattatgcttatcagaaagaaacgggcgcaagaggatgaatttgaggaatatgagtatgaggttcctcaagaacctatcaatttgcctgatatcaacgaagaggaaaatgaaacagcggaatcagtcagacgaaaacagcttgaaaagatggcgaaagacaagccggaagattttgcaaaactgctgagaagctggctggccgaggattaggaggaattagaaatggcgagacgtgatcaagataagcttacaggaaaacaaaaagcagccattctcatgatttccttggggttagatgtgtcagcttctgtctataagcacttaaccgatgaagaaattgaaaggcttactctggaaatatcaggtgttcgaagcgtcgatcatcaaaaaaaggatgaaatcatagaagaatttcataatatagccattgcacaagattatatttctcaaggcggtttaagctatgcaagacaagttctggaaaaggcgcttggagaggataaggcagagaacattctaaacaggctgacttcttctttgcaggttaaaccatttgattttgccagaaaagcggagcctgaacaaattttgaattttatccagcaagagcatccgcagacgatggcgttaatcttgtcttatttagatccagtgcaggccgggcagattttatccgagctgaatccggaagtacaggctgaggttgcgagaagaatcgcggttatggatagaacatctccagaaataattaatgaggtagaacggattctggaacaaaaattatcttctgcatttactcaggattatacacaaacaggcggaattgaagctgttgtggaagtgttaaacggggtagacagagggacagagaagacgatcttggattcattggaaattcaggatcccgatcttgctgaagaaattaaaaagcggatgtttgtcttcgaagatattgtcacacttgataaccgtgccattcagagagtcattcgcgatgttgagaacgacgatttgctcctttcattaaaggttgcaagcgaggaagtcaaagaaattgtattcaacaatatgtcacagcgtatggttgaaaccttcaaagaagaaatggaatttatgggccctgtacgcttgaaagatgtagaagaagctcaatcgagaattgtaagtatcgtcagaaagcttgaagaagccggtgaaattgtaatagcaagaggcggaggggatgatattattgtctaatatcattaaacaagaatcatctatttctccacaaaaggaaaaaagaaaactttctatacaagaggtgcgtattgatcattctcaccttttgcaggctgaagagaacccggaggcgcttatggcccgagtgaaagaggaagctgatcggatttctgagcaggcaaacagtcatatagaaaatattcgccgtcaaattgaacaggagaaaaacgattgggcggctgaaaaacagaagcttattgaagaagcaaaagccgagggctttgaacaaggagtagcgctgggcaaagctgaggcaatgaaacagtatgcagaactgatcggccaagcaaacagtataactgaaatgtccagaaaagctgttgaggacaagcttgaagacgctaatgaagaaatcgttgagcttgccgttgccctagcaaaaaaagtttggcagcaaaagtctgatgataaagaggctttcctcctgcttgtacaacaggttataaacgaagtgaaggaatatgacgatatatcaatttatgttgatccatattactatgagacaatctttcagcaaaaagatgaaatccagcagcttctttataaagaatgtcggcttggcatatatgctgatgaaaaagctcaaaaaggaacctgttatattgaaactccttttggcagggtagatgcgagtgttgacacacaattgatgcaattgaaagataaacttctgacagcgctggaagcaggtgcagctgaatgaagacacagagtctgatagattgtatagaaatgacagactcgtataaacggtacggaaaagtcaagcgggtcatcggcctgatgattgaatcaaaagggccagcaagctcaattggcgacgtgtgcctgatttatgcaaaaggacaatctgggaaagtcattaaagctgaggtagtcggcttccaggaagaaaatattttgcttatgccttatttagaggctgcgagcattgcacctggcagcattgtagaagctactggggaatcacttcgggttaaagttggaaccggactgattggacaagtcatcgatgcttttggagaaccgcttgacggaaaacttctgcctaaagggctttcgcctgtatcaacggagcaatcaccgcccaacccgatgaaacggccgcctatccgtgaaaagatgggtgttggagtcagatcaattgacagcttgctgacagtcggtaaaggccagcggattggaatttttgcaggaagcggtgtcggaaaaagcaccttaatggggatgatcgccaagcagacagaggctgacttaaacgtcattgcacttgtcggagaacgcggacgagaggttcgggagtttattgaaaaagatctggggaaagaggggctgaaacgatcgattgtagtcgttgccacctcagaccagccagcattaatgagattgaaagcggcatatacagcgactgcaattgccgagtatttccgagataaaggccaaaatgtcatgtttatgatggattctgttacaagggtggcaatggcgcagcgagagattggactggctgcaggagagcctccgacgacaaaaggttatacaccttcagtgttcgctattttacctcgtttactagaacgaacaggtgcaaacgagcatggaaccattacggcattttatacagtgttggtagacggggatgacatgaatgagccgattgccgatactgtacgcggaattttagacggacatattgtgttggacagggcgcttgccaataaaggccagtttcctgcagttaacgtactaaaaagcatcagcagggtgatgtcaaacatttcaacaaaacagcatctggatgcggcaaataaattccgtgaacttttatcgacatatcaaaattcggaagatctcattaatatcggagcttacaaaagaggatcatccagagaaattgatgaagcgatacaattttatccgcagcttattcaatttttaaagcagggaacagacgaaccggctttattggaagaaagcattgctgcattaactagtttgacaggaaatgaggaataaacgtggcttatcaatttagattccaaaagctgctggaactaaaagaaaatgaaaaagaccaatccttatccgagtatcagcaatcagtttctgaatttgaaaacgttgctgaaaaattatatgagaatatgagcaaaaaggaattgctggaacaaaataaggaaaagaaattaaaaagcggcatgagtgtacaagaaatgaggcactaccaacaatttgtctcaaatcttgataatacgatctatcactatcaaaagcttgtcattataaaaagaaatcaaatgaatcaaaaacaagaaattttgacagagaaaaacattgaagtgaaaaagtttgaaaaaatgcgtgaaaaacagtttaaaatgtttgctcttgaagataaagctgcagaaatgaaagaaatggacgatatttcgattaagcagtttatgattcaaggccattaggagcgaatgtaatgtccggcaaaaagaaagaatcaggtaagttccgttcggttttgcttatcattatcctcccgctgatgtttctattaatcgcaggggggattgttctttgggctgctggtatcaatgtcataaagccgatacaggatgctgcggcaaaaacgccggttcttaaagaattggtccctgaaaccgaaaataaaaaaggcgcagcatcaagtaaggatagcagtaatacggcagctctggaaaagaccattaaggatcaaaaaagtgaaatcagtatattgaataaagatttagaaacaagtaaatcagaaatcgataggctcaatcaaaagatccgttcacttgaaaagacggctgaggatcaaaaaaagtcatcagaagatcatactgaaggatcagcagactcgaaagcttcttctgaaaatgacaaagtgatcagtgtgtacaaaagcatggacagcggaaaggctgctaaaattattgcccaattaaaggagcaagaagcactgaaaatattgaatggcctaagcaaaaagcagcttgctgacatattggcgaaaatgactcctgagcaagcagcaacctatacagaaaaaattgctgccagccaagaatagggggaatgaaaggtgaagctgcttgaattagccggacctttgctgcaaaccacaacgggttctgccgctaaaaacatgaaaagtagccaaggagtttttcaaaactggcttatgtctgaggctggattgaaggaactttcagaacaaggaaagggtactcctaattccgaagatcagcttttagcagatgcgcttaaaaagatcggtgactggctaaatgcaagtcctgaagatcaagacaaacaaaatgcggatcttttgcaaacattaagcaaactgacagggaagcaattggatgcgaatgctctgcaaatgttgcaaaatcttttgcaagcagttgaatcaaaaatgtcaggcgggacggatcaattgctcacagaaacggagaaaatcttttcagaagctaaaacggctctgagtgccaatgattctgcttctgacattaatggagcactgaagtctgatacagagcaatcaaatcaggaaaatgaagtatccgagcctgctaaagagcttatctatatccagatgttcattagccagctcgtagaagggaataagctgactgatcgcgggaatggcaatgaagctcatgccatttaccaaaatggagatcaattcctttctgcattagaaaagaagggtgtatctcaacaactaattcaggatcttaaacagcaaatattcactaaagctgagtcaagttcaaaactttactcgatgacagcgtcagagctgaaaagttttcaaagcttaatggatcaaatgtctatgcttcctcaaaaagggaccaaagaatggagtttagctgaaagccagctgaaagccttcttgttatcgaaatcatccgaatcatcacaagactttgggaagcgtgttctcacaccgctctcgcagagttcatccagcaaaaatgcatcggatgtttctggaagtattcagcctgtagatagtaaatcaggactccaaatgctgttttcggggtatcggggcataggaggagttcaaacacttgatctgcagcagatgtcatctgatataccaaatgccgaaacaaaaacggtggctgatcaagtgattaatgcgtggaagcagatgaaatatacgcctttcggcagatcgacgggaagtttcactattcggctgaaccctgaacatttaggatttgtcacaatcaagctgacaaatgaaaatggaatgtttcagagtaaaatcatagcatctagccaatcagcaaaagaattgcttgaacagcatcttcctcagctgaagcaatcattgccgaatatggccgtccaaattgaccgttttactcttccggtccaaagcggggatcagccgatatacggccagcttgctgatgaacagaaacagcagcaagaggggcagagacagcaaagacagaaaaagcaatcaaatgattttggcgatctgctcgatgaagtgtcgatggttgaaatggaggaagaagaatgacttctataagttcagaatataaactgcctgaaaaaacgaacactgtgtcgacgaacaacagcagcttggggaaagacgagtttttaaaaatattaatgactcaagttcaaaaccaagatccgcttaacccgattgacgataaagaatttatcagccagatggcgactttttcaagcttggagcaaatgatgaatctgaatacgacaatgactcaattcgttgaaaaccaagatccgtttacaacgtatgttgattggatgggaaaagaagtatcttggactgatggtaaaagtgcaacagataaaacaggcacaataagctctgttaaacattttaaaggaaattattatctcgttcttgatgatgggaccgagatcagtcctgcgaatgtcatgtctgtgggacaatcatctaaataaaaacatctgggggaatatattatgttacgttcactttattctggaatcagcggtatgaagaactttcaaacaaagcttgacgtaatcggtaacaacattgccaacgtaaatacagtaggattcaaaaagagccgtgtgacctttaaagatatggtaagccaaaccattgccggcggttctgctgctggtgcaacaatcggcggaacaaactctaagcaaatcggtttaggttcatcatctggcacaattgatacaattcattcaacaagcgcgacacaaagcacaggaagaacacttgatttagcaattgacggcgacggttacttccgaattgatacaggtgacgggacagcttatacaagagcagggaacttctatttagataatactggaacactggttacaggtgatggctaccatgtactaaatatgaatggcggaacaattaaaattcctactgatgctcaaagctttagcattggttctgatggaaaggtgtcaattgttgatgctgaggggaaaacacaagacgggggacaaatcgggattgttacttttgccaacagtgacggcttagataaaatcgggagcaacctataccgtgaatctttaaactctggaacggccagtgcagcgaaccagcctggtgacggcggaactggtgctcttaaatcaggatttctcgaaatgtctaacgtcgatttaactgacgaatttactgaaatgatcgtagcccagcgcggattccaatcaaactcaaaaattattacaacatctgatgaaatccttcaagaactggttaaccttaaacgttaaggagggaggggaggcgagtaatcgcttctccgctgttttatgattaaagtaacccgtttgaacgggcagccctttacactgaatgcgctatttattgaacagattgaatgttttccggatactacaattactctgtcaaatggtaagaagtttgtagtaaaagaagatgaagaagctgttctggaaaagatcgcagctttctaccgaaaaatacaaatatttgcaatggatcaaggaatagaggaaccggaatgaagaaaaagttaatgatcatattactaattattcttatcgtaattggtgctctcggggcggcggcttattttgttttaggcggaaagtccgaaaaaagtgaagcgaaaaaaagtattgatgaaatcgttgcgtcttctgttgatgtagaagagatcacaacaaatttaaagtctgataacattatccgtcttgctattaaacttgaaactgattctgataaatcaaaagaagaacttgagaaacgtgatttccaagtgaaagacgctgttatatcactgctggctgatacgaatgctgatcagattgagggagacaagggaaaagaaacctttaagaaggaactaaaagataaaataaatagctacctccaagaaggaaaagtagaaaaagtgtatattacctcctttaatctgcaataaagcataatttgacagaatacggaggtgaggaaaatgtcaggagaagttctctcccaaaatgaaatagatgcactgctctctgcaatatcaactggtgaaatggacgctgaagagctgaaaaaagaagaaaaagagaagaaagtcaaggtttatgatttcaaacgtgcgctgcggttttctaaggatcagatccgcagtttaacgagaattcatgacaattttgcaagacttcttaccactcatttttctgctcagctcagaacctatattcacatatctgtcagttctgttgatcaggttccgtatgaggaatttatcagatcgattccaaacatgacgattctgaatctatttgatgttcatccgatggaaggaagaattatgatggaggtcaaccccacgatagcttatacgatgatggatcgagtcatgggcgggattggaatcagtcataacaaggttgacagtttgacagaaattgaaacaaaaatcatttctaatttatttgaaaatgcactgggtaattataaagaagcttggcagtcaattgctgatattgaaccggaaatgactgagtttgaagtgaatccgcaatttgttcagatggtatctcctaatgaaacagtcgtggtgatctcgctcaatactcaaattggtgaaatcagcggtgtcattaatctctgtatcccgcatattgtactcgagccgctcataccgaagctttcagtccactattggatgcaatcagaccgaaatgagccaaagcctgaggaaacaaagtcgcttgaaaaacgtatcatgacagcacaaatacctgtcgtggccgagctcggcacatctgaactgacgatagaagagtttttaagtttagaagtcggagactgcataactttggacaaatcagtcacggatcctcttactgtattggtcggagataagccgaaatttttaggacaagccggccgggtgaatcgaaaacaggcagtgcaaattttagatcacgacataagaggtgaacaagatggagaataatagattatctcaagatgagattgacgcgcttcttaacggtactggcagcacgcttgatgagccagagattccggaagtagatgacttatcggaaatggagcgtgatgcgatcggtgaaatcggtaatatttcattcggcagttctgcgacagcactgtcaacgcttttaaatcaaaaggtcgatattacgactccaagcgtaacggtcattccaagaagtaaaatcagcgatgcgtttcctgaaccgtatgtagcgattgaagtgaattatacggagggcttcagcggaagcaacctgttagtcgtggaacaaagtgacgcggcgatcattgcggacttaatgatcgggggagacggaaaaggtgcggacccttcactgggtgaaatccatttaagtgcggttcaagaagcaatgaaccaaatgatgggatcggctgccacatcaatgtctactgtattcagtaaaaaaattgatatttcacctcctcgggttgaattgctggatgttactgaagaaaagggtacagaccgtattcctgatgatgaaatgctggtgaaagtttctttcaacttaaaggtgggagaattaatagactccagcattatgcaactttacccattgacatttgcgaaagatttaatttcaagccttatgaactcagaaagtgcagaggaagaagaaacggtgcagcctgaagttacatacgaacagccgaaagagcctgtgacgccagagccgcgtattgaaccgaagcaacagcagcagccgccaaaaaggcagggaacagcaaaaaaagcagcgccagttcaggtttcaccggtggaattttccgcgtttgatccaaacgaagctgtacaagcccctattcataatctggatatgcttttggatatcccgctttcgattactgttgagcttggcagaacgaagagaagcgtaaaagagattttagagctttctgccggaagtattatcgagcttgataaattagccggtgagcctgtagatattttagttaatcagcgtatcgttgccaaaggcgaggtcgttgtcattgaagaaaacttcggagtaagagtcactgacattttaagccaggcagagcgcattaataatttaaaataacgaaacacaaggagagagatagattatggcacatagaattttaattgtagatgacgcagcatttatgcgaatgatgattaaagatattttagttaaaaatggttttgaagttgtggcggaagctgaaaatggagcacaagcggtagagaaatataaagagcattcacctgaccttgttactatggatatcacgatgccagaaatggatggtattacagcattaaaagaaattaaacaaattgatgcgcaggcaagaatcatcatgtgttctgctatgggacagcaatcaatggttattgatgccattcaggccggcgctaaggatttcattgtgaaacctttccaggctgaccgtgtgcttgaagcaatcaacaaaacattaagttaaagggtgtacgactgttgaaaaagagtcaatattttattgtttttatttgttttttcgttttattcagtgtacatccgattgctgctgccgcggcagactctgataattcaactgtaaacgaatggtttcaaaagaaagatgaaaaaactgcagatcaatcagagcaaaagaaagaaaaaacaacaaaaactgctgatgagacggagggagcggctgctccttctgtctcagcttttgattttgtaaagatgattttcgctttattgtttgttatcgcgctgatttacgggctggttaagctcatgaacaaaagaaatcggctcctaaagccttttcaatatgttgaaaatattggcggcacatcggtcggccagaacagatccatacaattgatcaaggtcggaaaaagtgtgctcatcgtcggtgtaggagagacgatccagctgctgaaagaaattgaggatgaaaaagagattgaagtcattctcagtcagcatgaagaggcaatgtcaagcaaaatagagtggcaaaagtttgtgaagccgcttaagagttctgaacatcagccgcagcaaaaactgccttcattttcaaaagcattaaaagagcaacttgaagagttaaaacaaaaccgttctgaaggaaagaagaaaggcccacgtcatcatgaatgagtttataaatattttcagttcaagcgatccggaaaacgtaagttcgactgttaaattactattattgttaactgtattttcagtggcgcctggaatattgattcttatgacttgttttactcgcatcgtcattgttctgtcatttgtcagaacttcacttgcgacgcaatctatgcccccaaaccaggttctaatcgggcttgcgctgtttttaacattttttattatggctcctactttttcagaaattaataaagaagcgctgaccccattaatggacaacaaaatcagcttggatgaagcgtatacgaaagctgaggaaccgattaaagaatttatgagtaaacacacaaggcagaaggatctggcgctgtttatgaattacgcgaaaatggataaacctgaatcattaaaggatattccgttaacaacaatggttccggcttttgccatatcggagcttaaaacagcatttcaaataggttttatgatttttatcccttttttaattatagatatggtagtggcgagcgtcttgatgtcaatgggaatgatgatgctgcctccagttatgatttctctgccctttaaaatattactttttgttttggtagacggctggtatttaattgtgaaatctttgcttcagagcttttagggtaggtgctaaacgtgagttcagaatttgtaatttctatggcggaaaaagccgtatacgtaacgctgatgatcagcgggccattattggctattgctttactggtcggtttaattgtcagcatatttcaggcgacaactcaaatccaggaacagactttggcgtttattccgaaaatcgtggcggttctcctggctctcattttttttggtccgtggatgctgtcgacgattctttcatttacaacagagctgttttctaatttaaatcgttttgcagggtaatgtagagatgaattcaattattgacttatttcctgcttttttattggtttttattagaatctctgctttttttgtaacgattccgctatttggacatcgaaatgtgccagctgttcatcgcataggttttgctttttttcttgcggtcatttgtttcagcaccattgataaaccgccctctttggagatagatgagcactatatgcttttggcgtttaaagaagctttggtcggcctatgtctgggtttaattgcttatatgatgattgccgcagtgcagattgccggctcgtttattgattttcaaatgggattttcaatagcaaacgttattgatccgcaaaccggtgcacaaagtccgttgattggccagtttatctatacgatggcacttttgtttatgctaagtgtcaatgcccaccatttgttgctggatggtatttactacagctttcagtatatttcagttgatcaggcatttccgaatttcggcgatgaaaagtttgcctattttattgcgaaaagctttaatgcaatgtttattatcgcttttcaaatgtcagcgccggttgtggccagtttgtttctagttgatttagcattaggtatcgtggctcgaactgttccgcagttaaatgtatttgtggtcggtctgcctttaaagatcgctgtcagtttcattatgctcattgtatgtatgtccgttatcttcgtcgttgtccggaatgttttcagtttaacgattgaaacgatgcggaatcttttagcattggtcggtgtttcttaatgaagcttagagttgacctgcagttttttgcgggagagaagacagaaaaagccactccgaaaaaacggaaggatacgcgaaaaaaagggcaggtagccaaaagctcggatgtcaataccgccgtttctttactggtaatattcctttcgcttattgcaattggtccgtatatgagagacaggctgctgtcattcatagaaacattttataccgaatcgctcacaatgaagctctcagaatcaaatgtgcatacattgtttgtcagcttattaaaggatatgggcatgatactcgcaccgatcttgctagttgctcttgttgcaggagtcgtaagcaactatatgcaggttgggttcttattttctgctgaagtgatacagcctaagcttgaaaaactggatccgatcaaaggctttaaacgaatatacagtatgagggcgattgtagagctgattaaatcaattttgaaaatcgtagtcgttggttttgcggcttttgctgtgctttggctgcattatggagaaattctccggcttcctctcctgacacccgaagaggcactttctttcgtttcaaaactcactttgtggatgggactaagcggtgcaggtgcattgttgattcttgctggtctcgactatttatatcagagatttgactatgagaaaaatatcaaaatgtcaaaacaagatataaaagatgagtacaaaaaatctgaaggagacccgattatcaagtctaaaattaaacaaagacagcgggaaatggcgatgaggcggatgatgcaggaagttccaaaagcagatgtcattatcacaaacccgactcactatgcgattgctttgaaatatgatgaagaaaaaatggacgcaccttatattgttgcaaaaggcgtcgaccaccttgcgttaaaaatcaggaaaattgctaaagagcatgatgtcatgatggtagaaaacagaccgcttgcccgtgcgttatatgatcaggtggaaattgaccaggcagtgccggaagaattttttaaagttttagcagaaattctggcttacgtatataaaacaaaacaaaaagtatattgaatttttcgatttaaaaggagagaaaaaacagcatgtcaacaagagatttatccgttttaataagtgttgtcctcattgtggcgatgctggtgattccatttcctccatggctgttaagtattttgatcattattaatatttctcttgcattgatcgtgcttctcaccacaatgaatatgcaggaagcgcttcagttttcgatttttccgtcactgttgctgcttttgaccctatttcgtttgggcttgaacgtctcaactacccgttcaattctttcacacggtgaaggaggtaaagtcgtcgagactttcggaaatttcgttgtcggcggaaatgtattagttggactcgttgtatttatcatccttattattattcagtttatcgtcattacaaaaggtgctgaacgtgtttccgaggttgcagcaaggtttacgctggacgcaatgcctgggaagcagatgagtattgatgctgatttaaacgcagggatgattaccgaacaggaagcgaagcatcgccgcgaaaaagtggcaagagaagcagacttttatggagcaatggacggtgccagtaaatttgtaaaaggtgacgccattgccggaatcatcattgtgatgatcaatattattttcggaatcgtgatcgggatgcttcagcagggcatgtccattcaagaggctgcttcacactttacgatgctgactgtaggggatggaattgtttcgcaaatcccggcactgttaatttctacggctacgggtattgtggtcacaagagctgcctctgaaggaaacttagggcatgacattacaggccagctgtttgcgtatccaaagcttttatacgtcgcagcagctacgatcatgcttttaggtattttcactccgatcggcatccttctgacggggccgcttgcgggattgcttgcttttggcgcatatacactatctaaatcaggtaaggaaaaagaagaagtggatgagattcttgaggaagaggctgaggtggacgagcttaaaagccctgaaagtgttgttcagcttctgcatatagatccgatagaatttgagtttggatatggcctgataccgcttgctgatgccaatcaaggcggtgatttattagaccgaattgttatgatacgccgtcagttggctttggaactcgggcttgtcattcctgtcgtgcgaatcagagataatatagcgttgcagcctaatgaataccgattgaaaattaaaggaaacgaagtagcaaaaggcgagttgttgcttgatcattatttagcgatgtcgcctactcctgaggacgatctcattgaagggattgaaacagtggagccttcattcgggctgccggctaaatggattagcgaagcggtaaaggatgaagccgacatgcttggttatacagtagttgatcctgcatcagtcgtttcaacgcatattacggagaaaattaagcagcatgcccacgaattgatcggaaggcaggagacaaaacagctgatcgatcacttgaaagaatcgtatccagtcctggttgaagaggttacgccgaatccattgtctgtcggtgatattcagaaagtgcttgctaagcttttaaaagaaaaagtttcaattcgaaacttagtaacgatttttgaaacacttgctgactatgggaaattaacaacagattctgatcttttgacagagtatacaagacaagcgcttgctaaacaaattacagcccagtttgccaaagaaaatgaagtgttgaaggttgttacttgttccggccgtgtagaaaaagcaatagcagacggtgtgcagcagacggaacacgggaactatttatcacttgaaccagatatttcagaaagtatagtgcgctctgtcgccaaagaagctgaacagctctcattacgtcaggaaaccgcgattcttctttgctcgccgcctgtcagaatgtatgtgaagcagcttctggaacggtacttccctgatcttccggtactctcttataacgaacttgaggcgaatgttgaggtacaaagcattggagtggtggatatttaatgaaaataaaaaaatttactgctgcttcaatgcaagaagcggcacttctcatcagaaaagagttaggtaatgaagcggtcatattaaattcgaaaaaaattaaaaagcgaaaatggtttggcctcgtcaacaagcctgctgttgaagtaatcgccgtattggatcaggactttcttgagaaaaaaacgcctcagaaggcagctgaaccgaaacaaacattaaaaactccggtcagcagtccaaaaatagaggagagaacatatccccctcaaattccggcgcaacaggagctaggtgatttttcagcatatcaatctgtacttcctgagccgctgcgaaaagcagaaaagcttttgcaagaaacagggatcaaagagtctacgaaaacgaacactctgaaaaaattgcttcgcttctctgttgaagcaggcggcttgactgaagaaaatgttgtcggcaaacttcaggaaatactatgcgatatgctgccctcagcagacaagtggcaggagccaattcattcaaaatatatcgttctctttggttcaacaggggctggtaaaacaactacactggctaaactcgcagccatatctatgcttgaaaaacataaaaaaatcgcttttattacaacagatacgtatcgtattgcagctgttgaacagttgaaaacatacgctgaactgctgcaggctcctctggaagtttgctatacaaaagaagaatttcagcaggcgaaggagctattttctgagtatgatcatgtgtttgttgatacagctggaagaaacttcaaagacccgcaatacattgatgaactgaaagaaacgattccttttgagagcagcattcagtcatttcttgttttatccgcgactgcaaaatatgaagatatgaagcatattgtcaaacggttttcatccgtccctgtcaatcagtatatttttacgaaaatagatgaaacgacttccttaggttctgtatttaatatactggcagaatcaaaaataggtgtcgggtttatgactaacggccagaatgtgcctgaggatatacagactgtatctccacttggttttgtgaggatgctgtgcagatgaacagatatgaccaagcagcaactttacgggcgaaaatggaaaaacgtgagcgcgttctgccaatggtttattcacaaaaagcgaagacacttgctgtcatcagcggcaagggcggtgtcggaaaatccaatattaccttaaatatggcacttgcgctgcaggataaaggtaagaaggtgctgctcatcgaccttgatatcgggatggggaacattgatatattaataggaaattcatcgtctgccacgataatcgatgttttaaccgatcgtcagcctttgctgcagtcattatccgttggcccaaagggtttgcggtatatatcagggggaaccggtcttgatgtgatgtttcagctcgatcagagaaaatggacgttttttgccaatgaactttctcatgcattaagccagttcgattatgtgctgtttgacatgggagcaggcttatcaaaagatcaactgccttttattttatcagcagaagatattttgattattacaactcccgagccgacggccattatggacgcatacagcgctgtcaagcacttggttttgacagaaaataagctttcaatgaaggtggctgtcaatcggtgccgtgaccaaaaggaagggcttgacgcttttgcccgcctctcccgtacaattcatatgtttttggatgttcaggttcagtttgccggttccgtttctgacgatgtgatcgtgagcaaagcggttgtcgaacaggttccttttttcataaaaagccctcaggcaaaagccagccggtcagtccgtattttagcggacgccttgtttgaaagagaagaaacgagacacaaagaagacaaacagacatttattgagaaattatcttcttttttaatgaggagggcttaatttgattcgtgtgcttgtagttgatgattcagcttttatgagaaaaatgataagtgattttctgaccgaagaaaagcagatagaagtaatcggaactgcgagaaacggagaagaagcgcttaagaagattgaattattaaaaccggatgttattactcttgatgttgaaatgccggtcatgaatgggacagatacgctccgcaaaattattgagatttataacttgccggtcattatggtgtctagccagaccgagaaaggtaaagaatgcacaattaattgtttggagatcggtgcctttgactttatcacaaagccatcaggctcaatatctctggatctatacaaaattaaagaacaactagttgagcgtgtcgtcgcggcaggactttccggcaagcggaaacgtcctgtttcccagacagttcggcccgaacctattgtgcgtgctgtcgttaagcctgaattaagcaaaccgaaacctggcacgggcagacaaattgtgtgtatcggcacatcaacaggcggtccacgggcgttacaaaaggtgataccgaagctccctaaggatttgaacgcaccagtggttgtcgttcagcacatgcctgaagggtttactgcttctttggctgatcggctgaatcatttatctgacattcaggtaaaagaagcaaaagatggtgaagcagctcttaacggctgtgtttacatagcaccgggcggaaaaaacatatccgttattaaaaacagcgaaggactccaggttgtgcttgataaccatgacacaccaagccgtcataaaccatctgctgattatttattccgttctgtcgggaaactgacagattatgaaaaagtagcggttatcatgaccggaatgggcagtgacggcactgctggactaaaggacatgctaacagccggcaatgtgaaagccattgcggagtctgaagaatcttgtgtcgtatacgggatgccaaaagctgctgttaaagcgggtctcattcatgagattaaacatgtggaagatatcgcagcatccatcacaagctgtgtgaaaaaagagagggtgtgattcaaatggatatgaatcagtatttagatgtctttattgatgagagtaaagaacatttacaaacatgtaatgaaaagcttcttcttttagagaaagacccgactgatcttcagctcgtacatgatatattcagggctgcccatacattaaaaggaatgagcgcaacgatgggctacacggatttagcacatcttacccatctgcttgaaaacgtgctggatgcaatccgaaacggagacatggaagtcacctcagactggctggatattttgtttgaagctctggatcacctggaagcaatggttcagtctattattgatggcggggatggtaaaagagatatctcagaagtgagtgccaagcttgatgtgaatggtgcgcacgctgaatccgctgcctccgctgaacctgcagaagcacagagttcagcatctgattgggaatatgatgaatttgaacgcacagttatacaagaagcggaggagcaaggcttcaaacgatatgaaatcaagatttctctgaacgaaaactgtatgttaaaagcagttcgtgtctatatggtgtttgaaaaactaaatgaagtcggagaagtagccaaaacaattccaagtgctgaagtgcttgaaacagaagattttggaactgactttcaagtttgtttcttaacacatcaatcagcggaagacattgaacaattaatcaatggcgtgtcggaaattgagcatgttgaagtcattcaaggggctcctttaacatcagctgaaaagcctgaagaatctaagcaagaagattcaccagcagcagctgtacctgcgaagcaggagaaacaaaaacagcctgctaaaaacgatgaacaggcgaagcattcagccggcggatctaaaacaattcgtgtcaacattgacaggcttgattctttaatgaacttatttgaagagcttgtcattgaccgcgggcgtctcgagcagattgcgaaagagcttgagcataatgaactgactgaaacggttgaacgaatgacgagaatttccggagatttgcaatcgattattctgaatatgagaatggtcccggttgaaactgtttttaacagattcccgagaatgattcgccagcttcagaaagagctgaataaaaaaattgaactctcgatcatcggtgcggaaactgaactggatcgtacagtaattgatgaaatcggagatccactcgttcacttgatcagaaacagtattgaccatggtatcgaggcgccggaaacacgtttgcaaaagggaaaaccggaatcaggaaaagttgtgcttaaagcttatcacagcggcaaccatgtctttatcgaagtagaggatgacggcgcaggccttaatcgaaaaaaaattctggaaaaagcgcttgagcgcggggtcataacggaaaaagaagctgaaaccttagaagacaaccaaatttacgaattgatttttgctccggggttctcaactgctgaccaaatttctgatatttccggccgcggtgtaggacttgacgttgtaaaaaacaaactggagtctcttggcggttcagtcagtgtgaaatcagccgagggtcaaggctctctattcagcatccagctgccgcttaccttgtctattatttcagttctgctgattaagttggaagaagagacatttgccattccgatttcttcaatcattgagacagcagttattgacagaaaagacattttgcaaacgcatgaccgtgaagtgattgactttagagggcatattgtccctgtcgtttatttaaaagaagagtttaaaatagaagatacaagaaaagatgcggaacagctccatatcattgtcgtgaaaaaaggcgacaaacctactgcatttgtggtggactcctttattggccagcaggaagttgtgctgaaatcactcggagattatttaacaaacgtctttgcaatttccggagctactattttaggagacggagaagtagcgctcattattgattgtaatgcactgattatttaaccattcgaggaggtgtctcacatgactgcagaaattaaaacaggcgaaaaaatgatagtctttatggtaaatggcaaagaatatgccatttccgtcactcaggtgaaatcaattgaaaaatggcaaaagccaacgagggtacctggcgtcgaaccatatatttgcggggtaatcaatttacgcggggtggtgactccggttattgatttaagaaaacgcctgaatttgccagagtatgaaattacagatgaaacacgaattatcattattgcttatcgtgatattgaagtcggctggattgtggatgaagcgaatgatgtgattaccgtacacgaaagtgaaatagaatctgctccagaaggcgttcagaaagatacggatgtgtcgatcgaacagattgtgaaacaagagaacagactcttaaatattattgatgcgaacgcggttttggataaagaatcatctcagtccgctgtgcccgatcaagcttaatcttaaaggggttatgacatgagtatttttaatggaatcaaagaagagcagatggacattttgcgggaagtcggcaatataggcgccggccactccgcctctgcaatggcccagctgttaaatagaaagatagatatggaagtcccatttgcaaagctgctgtcttttgatgagcttgttgattttttcggcggcgccgatgtcccggttgccagcatctttttaagaatggaaggcgatttaacgggttcaatgttctttataatgcctttttttcaggcggagcagtttatcagagagctgattggaaaccccgattttgacatagaggacttaggtgaagaccacatgagctcatccgctttgcatgaactgggcaatattttagcggggtcatatttaacagctttggcggatttgacgaaactccagctctatccaagtgttcctgaagtctctttggacatgttcggagcagtgatcagcgaagggctgatggagctcagtcaggttggagaacacgccattgttgtcgacacgtcaatttttgaccaaagccatcagcaggagctgaaagcgcatatgtttatgctgccggactatgattcatttgaaaagctctttgtcgccttaggtgcatcattatgagtacaactgaggctgttgttataaaggttgggattgctgacgtgaagatcgcccgcttcccggataccatccggacctctggtttgggctcatgtgtggggctggtgctttatgataaagaaaagcaaacggcgggtcttgttcatgtcatgcttccggattcgacgttatcgaaaactgccgagctcaaccgggctaagtacgctgacaccgccgtacagaccacgattgatatgctgatagaagcgggatgccggaaatttgcattaaaagcaaagctggccggcggatcagagatgtttaaatttaaatcgacaaatgatttgatgaagatcggaccgagaaatgtattagcgataaaagaacagctgtctttatttaatattcctattattagtgaagatacgggcggctcaagcggccggacgatagaatttgaaccgaagtcctgcatgctgcatattcgaactgttaaacaaggtgaaaaaacgatttaattaaggtattagggggataacaatgcaatccttgaattatgaagatcaggtgctttggacgcgctggaaagagtggaaagatcctaaagccggtgacgacttaatgcgccgttacatgccgcttgtcacatatcatgtaggcagaatttctgtcggactgccgaaatcagtgcataaagacgatcttatgagccttggtatgcttggtttatatgatgcccttgaaaaatttgaccccagccgggacttaaaatttgatacctacgcctcgtttagaattcgcggcgcaatcatagacgggcttcgtaaagaagattggctgcccagaacctcgcgcgaaaaaacaaaaaaggttgaagcagcaattgaaaagcttgaacagcggtatcttcggaatgtatcgcccgcggaaattgcagaggaactcggaatgacggtacaggatgtcgtgtcaacaatgaatgaaggtttttttgcaaatctgctgtcaattgatgaaaagctccatgatcaagatgatggggaaaacattcaagtcatgatcagagatgacaaaaatgttccgcctgaagaaaagattatgaaggatgaactgattgcacagcttgcggaaaaaattcacgaactctctgaaaaagaacagctggttgtgagtttgttctacaaagaggagttgacactgacagaaatcggacaagtattaaatctttctacgtcccgcatatctcagatccattcaaaggcattatttaaattaaagaatctgctggaaaaagtgatacaataatgaatttcatggttagcgagtgaaaaacatgtcaacactattatggcttttaagctttacgctccacggcgttcttctgtacgctgtcattatcctgtatacgaggctcgctgcagtgaaagaaacagaaaaacagcaaaaacagatacttgaagagacggaaaacaccttggcggcatttctgcttgaattaaaagaagaaaatgagaaactgatagaaaataaagcttcatctgcaagtcaatacgatgaagaatcccaaaagccaggccttcagccctctgaaacatatcaagagcgggatccagtccaagaggcagagaatcttcctgaacatattgaaggtctgattacagaggttgaccgtcgggaagagatcgtaaacagtgaggtccaatcatttgaagaccaggtcatagaattatatgaacagggatattcggcaagtcaaattgcccagaaaatgaagagcggaaagacagaaatcgagctatttttaaaatttcgctccaaaggtgtaaaggattcttgattgtcggataaagctgtgttatattatgtcttggtgttaaatacacacgcttaacgatttatgcagagggtgctgcaggcggcagttctgcacaaaaatgacctaagcggaggaaaaaaaccattatattaggaggaaataacatgtcagtcatttctatgaagcaattgcttgaagctggtgttcacttcggtcaccaaacacgccgttggaacccaaaaatgaagcgttacattttcacggagcgtaacggaatctacatcattgaccttcaaaaaacagtcaaaaaagtagaggaagcttacaacttcactaaaaatcttgctgctgaaggcggaaaaatccttttcgtcggaacaaaaaaacaagctcaagattctgttaaagaagaagctcaacgctctggcatgtactatgtcaaccaacgctggttgggcggtacattaacaaactttgaaacaatccaaaaacgtattaaacgtcttaaagacattgaaaaaatgcaagaaaacggtacgtttgatgtacttcctaaaaaagaagtcgttcaattgaaaaaagaattagagcgtcttgaaaaattcctaggcggaattaaagatatgaaggatcttcctgatgcattattcatcatcgatcctcgcaaagagcgcatcgctgttgcggaagctcgcaaattaaacatccctatcatcggtatcgtagatactaactgtgatccagatgaaatcgatgttgttatcccagcgaacgatgacgctatccgcgctgttaaacttctaacttctaaaatggcagatgcaatcttagaagcgaagcaaggcgaagaagaagcggaagttgctgaagaaactgcaccagaaacagaaacaacaactgcgtaacctattcaaaaggtgataagagggactgccttttatcaccttttttcaagaaaaatgtgtaatatacatactcttgtttaaacatataaggaggaatacaaatggcaattactgcacagcaagtaaaagaactgcgtgaaaaaactggcgcgggcatgatggattgtaaaaaagcgttaactgaaactgacggagatatggacaaagcaattgaccttttaagagaaaaaggaattgcaaaagcagcgaaaaaagctgaccgtatcgcagcagaaggttctactcttattaaaactgacggcaacaaaggcgttatcctagaagtaaactctgaaactgatttcgttgcgaaaaacgaaggttttaaagagcttcttaacactttagctgaccaccttcttgcaaacacgccagctgatgttgaagaagcaatgggccaaaaaatggaaaatggctcaactgttgaagagtacatcacaagcgcagttgctaaaatcggtgagaaaatcactcttcgccgctttacagttcttacaaaagacgacagctctgcattcggtgcgtaccttcacatgggcggccgcatcggtgtattaactgttctcaacggtacaactgatgaagaaactgcgaaagatatcgcaatgcacgttgctgcagttaaccctcgttacatttctcgtgatcaagtatctgaagaagaaacaaatcatgagcgtcaaatcttaactcagcaagccctccaagaaggcaaacctgaaaacatcgtagcgaaaatggttgaaggccgtctgaacaaattcttcgaagaaatttgtctattagaccaagcgttcgttaaaaacccagatgaaaaagtgaaacaagttattgcagcgaaaaacgctactgttcaaacttttgtccgctatgaagttggagaaggcatcgaaaaacgtcaagaaaactttgctgaagaagtaatgaaccaagtgaaaaaataatggtgaaaagatttcgcggctaagtcgcgtcttttcaggcagtataggggacacattttgtgttccctatttttaaaactatatttacaaacctttttttctcttgcataatagaaaacggcaatgtttacacttggaggttatcatggaaaaaccaaaatacaaacgtatcgtattaaagcttagcggggaagcattggcaggagaacagggaaatggaattaacccgactgtcattcaatccattgcaaagcaagtgaaggaaatcgctgagcttgaagtcgaagtggctgttgttgtaggcggcggcaacttatggcgcggaaaaacaggaagtgacctgggcatggaccgcgcgactgctgactatatgggaatgctggcgacagtaatgaattcgcttgctcttcaagacagcttggaaacactcggaatccagtccagagtgcaaacatccattgaaatgagacaagttgctgaaccgtacataagaagaaaagcgatacgccacttagagaaaaaacgtgtcgttattttcgctgcgggcacaggaaacccatatttctcaactgatacgacagctgcactgcgggctgctgaaattgaggcagacgttattttaatggctaaaaataacgttgacggtgtgtataatgctgatcctagaaaagatgaatcagctgttaagtatgaatcactttcttatcttgacgttcttaaagacggcctggaagtcatggattcaacagcttcctctttatgcatggacaatgacattccgcttatcgtcttttctattatggaagaaggaaatatcaaacgtgccgttatcggtgaatcaatcggaacgatcgtgagggggaaataacgtgtcaaaagaagtattaactcaaacaaaagaaaaaatggaaaaagcaattgctgcttatcagcgcgaattggctactgtacgcgcaggccgtgcaaatccatcattattagataaagtaacggttgaatattacggagcgcagacacctttaaatcagttgtcttctattaacgtgcctgaagctcgtatgctcgttatcacaccatacgataaaacagcaatcggcgatatcgaaaaagcgattttaaaagctgatttaggtcttacaccaacaagtgacggcaatatgattcgaattgcaattccggcactaacagaagagagacggaaagaattagtgaaagttgtaaaaaaatatgctgaagaagcaaaagtagctgttcgtaacgttcgccgtgatgctaacgatgatctcaaaaaacttgagaaaaacggagacattactgaggatgaactgcgtgcttccactgaagacgttcaaaaactgacagatgaatatgtgtcaaaaattgacagtgtcacaaaagacaaagaaaaagaaatcatggaagtttaatgaaaaactatgtacaatagataatagtgaaaagaccctctcatgtttacagggggtttttttgttaatactgttgattacattgattatcagcagggaatgtaacctttttgggtgacggaggaatctcatgctcaacatactcaaaaattggaagaatcagcaaactgcggcttccaacttagaacgttatacaaaagaagacatacttaagggagaaattcccgaacacatcgccattatcatggatggaaatggccgttgggctaaaaaacgctctcttcccagaattgcaggccaccatgaagggatgaaggtggtaaaaaggaccacgaagctcgcaaacgaattaggtgtcaaagtactgacattgtatgcattttcaacagaaaactggaaaagaccgaaaatggaggtcgattttttaatgaagcttccggaagaatttttgaatacgtatcttccagagcttgttgaggaaaatgtacaggttcggatcattggggatgaaacggctttgccggcgcacacattacgtgcgattgaaaaagctgtacaggacacggcgcaaaacgacggaatgatccttaattttgctcttaactatggaggccgtactgaaattgtcagtgctgcaaaatcactcgcggaaaaagtgaaggaaggctctttgaatattgaagacattgatgaatcgcttttttctacttatttgatgactgaatctttgcaggatcctgaacttttaattcgaacgagcggcgagataaggctgagtaattttatgctatggcaggttgcctacagtgaatttgtctttactgacgtcttgtggcctgactttaaagaagatcacttcttgcaggcgttaggagagtttcagcagagaggccggaggtttggcggaatttagaggatggtggacatgaaacaaagaattttgacaggtgttctggcagcaattgtatttttatttttggttattgtcgggaaattgccgttcaccatattaatttatgctatgagcagtgtggcgctttttgaacttttacggatgaaaaagctgaagctggtttcactgcctggtttgatcggtcttttattattgtggatgttcttattgccaagccagtattcgttttttgaagcggacgggatttccaaaatggaaatagctttatttgcggtactgctattgctgacttacacagtgttggtcaagaacacctttacttttgatgaagtcgggtttattacgcttgcagcaatttacatcggaatgtgttttcattattttatcgaaatcagaaatcttgaccaatacggattaacatacattttttatgcgtgtgttgtcatttggtccaccgattccggtgcctattttgtcggtaaatcgcttgggaagcggaaactgtggcctgaaatcagtccgaataaaacagtggaagggtttgcaggcggaattgtcatcgcacttgtattggcgacgatttttcagcttgttgcacaacttccgatcccgtatatctatctgctgttgatcacgctgtttttgtctgtttttggacaactgggagatttagtggaatccgccttgaaaagacattacgatgtaaaggattctgggaatattcttcccgggcatggcggtatattagaccgttttgacagtttcttgtttgtcatgcctttcttgtactttctgcttgcccttttttcataaaaaagtctaatatgaatatgagactgatcatgcagcaataagaataggagtagtggcaactttgaaaaatatttgtcttttaggagcaacaggatcaatcggcgaacagactcttgatgtactgcgtgcacatcaagaccaatttcagctggtatctatgtcgtttggcagaaatattgataaggccgttccaatgattgaggtctttcagccgaagtttgtctctgtcggtgatctggatacatatcataaattaaaacaaatgtctttttcttttgaatgccaaatcgggctgggagaagaaggactgatagaagcagcagtgatggaggaggttgacattgttgtcaacgctttgcttggaagcgtcggtcttatcccgacattaaaggcaattgaacagaaaaaaacaattgcgcttgcaaataaggaaactcttgtcactgcagggcatatagtaaaagaacatgctaagaaatatgatgttccgctgctgcctgttgacagtgagcattcagccatttttcaagctcttcaaggcgaacaggctaaaaacattgaacgcctcatcattacggcatccggcggaagttttcgggacaagacgcgggaggagctcgaatcagtaacagttgaagatgcattaaaacatccaaactggtcaatgggtgcaaaaattacaattgattcggctacaatgatgaataagggattagaggtgatcgaggcacactggcttttcgatataccttatgaacaaattgatgtggttttacataaggagagcatcatccattcaatggttgagttccatgataaaagtgtgatcgcacagctcggaactccggatatgagagtccccattcaatatgcgctcacttatcctgaccgattgccattaccagatgcgaaaaggcttgaattatgggaaatcggcagccttcattttgagaaagctgattttgacaggttccgatgcttacaatttgcttttgaatcaggtaaaataggaggaacaatgccgacagtgctaaatgcggcaaacgaagtagctgtcgctgcctttttagctggcaagataccgtttttggctattgaagactgtatcgaaaaggcactaacccgccatcaattactgaaaaaaccgagcctggcggacattcaagaagtggacaaagatacccggggatacgtcaattcaatactcacataaggtggtatgttcgtgaatacagttatagcgtttatcattattttcggaacgctcgttttcttccatgaactgggccatttattgctagcccaaagagcgggaattctctgccgtgaatttgcgatcggcttcggtccaaagattttttctttcaaaaaaaatgaaacagtttatacgatcaggctgcttccggtcggcggatttgttcgtatggccggcgaagatccggaaatgattgaggtgaaacccggatacacggtcgggcttctgtttaataaagaagatcaagttgagaaagtcatcatcaatcaaaaggaaaaatatccggatgctttagtcattgaagtggaaacagcggatctagagcatgacatgaagatcactggttatgaacaggggaaagaggacgaactttccagctttactgtcagcgaaacatccttttttattgtagacggagaagaagtgcagattgcgccgtataatcgccaatttggttccaaacctgtatggcagcggattaaagcaattgctgcagggccgattatgaactttattttagcttacgtcattttagtgatgcttgggctgattcaaggcgtaccgtcaaatgaacctatgctcgggcagctgacagacaatggacgggcggctgaagcagggctaaaagaaggggattatatccaaagcattaacggagagaaaatgaggtcttggactgacattgtctccgctgtaaaagaaaacccggagaaagaaatggacgttgcagtaaaaagagataacaaaacgcttcatatttcggtgactccggaagctgttaaagatgagaacaaaaaaacaatcggacgtttcggttcctatgcgccgactgaaaaaggcgtactctcagcggttgcttacggcgcgacatcaacagttgatgtcaccaaagccattttaaccaatctgagcaaattagtaacaggccaatttaaactcgatatgctgtcaggtcctgtcggcatatatgacatgacagaccaagtggcgaaaacagggatcgtgaacttatttcagtttgcggcgtttttaagcattaaccttgggattgtcaacctgcttccgattccggcacttgacggaggaagactgttgtttctatttattgaagcgattcggggcaaaccgattaacagggaaaaagaagcatttgttgtgtttatcggagtagctttcttaatgcttcttatgctggttgtcacatggaacgatatccagcggctgtttttgtaaacgaaaagtaaatcaatcagaggtgcgaagaaatgagacaaagcttgacgcttattcctacgctccgtgaagttccagctgatgccgaagcaaaaagtcatcagcttcttctgagagcaggatttatcagacagaatacgagcggggtatacagctatatgcctcttgcgtataaggtgattcaaaacattcagcagattgttcgagaggaaatggagaaaattgatgccgtagaaatgctcatgcccgcattgcagcaggcagagacatggcaggaatcaggcagatggtatacgtatggtcccgaactgatgagactaaaagaccgtcatggccgtgaatttgctttaggggcaacgcatgaagaggttatcacttcgcttgttcgcgatgaggttaaatcttataagcgtctccctctgactctttatcaaattcagtctaagttcagagatgaaaaacgtcctcgcttcggtttgttaagaggccgcgaatttattatgaaggatgcgtactctttccatgcatctgcagagagcctggatgaaacgtatcaaaaaatgtacgaggcctattctaatatttttgcccgctgcggcattaatgtaagacctgttatcgctgattcaggcgcaatgggaggaaaggatacgcacgaatttatggcactttctgcgatcggagaggatacgattgcgtattctgatgaatcacagtacgcggctaatatcgagatggctgaagttcttcaccaggaagttccttcagatgaagagcctaaagctctagagaaggttcatacgcctaacgtgaaaacaatcgaagaactgactgcgttcttacaggtttcggctgaagcgtgcattaagtcagtattgtttaaagctgatgaccgttttgtcttagtgcttgtaagaggggatcatgaagttaacgatattaaagtgaaaaacttgcttcatgcagaagttgtagagcttgctacacatgaagaggtcattcagcagctcggaacagagccaggctttgtaggccctgtcggtattcatcaggatgtggaagtatatgccgatcaagctgtgaaagcaatggttaatgctgttgccggggcaaatgaaggagatcatcattataaaaatgtcaatgtgaatcgtgacgcgcaaattaaagaatttgctgatcttcgttttattaaagaaggtgatccttcaccagacggcaagggaacgatccgttttgctgagggaatcgaagtcggacaagtctttaagctcggaacacgctattcagaagcgatgaatgcgacatatttagatgaaaacggacgcgcgcagccaatgctgatgggctgttacggaatcggtgtgtcaagaacgctttctgctattgctgaacagcatcacgacgaaaaaggcttaatatggccaaaaagcgttgcgccgtacgatcttcatattcttgctttgaacatgaaaaacgatgggcaaagagagcttgctgaaaagctgtatgccgatttaaaagcggaaggctatgaagtgctctatgatgaccgtgctgagcgtgccggcgtaaaattcgctgattcagatttaatcggccttccaatccgcatcactgtcggaaaacgagctgacgaaggaatcgtcgaagtgaaaattcgtcaaactggtgagtcaactgagatttcagtagacgaattatctgcgtttatcagcaagcagtaatcaccataacgatttatcaaaaaacatgttaaaatagaaataatagaaggtacctcattgcctgaggtaccttcacttatgatgtttttagggagggatactgtcttaatggaacagttatcagtaaacagaaggcagtttcaaattcttctgcagcagattaatatgacagatgataccttcatgacatactttgaacatggcgagattaaaaagctgacaattcacaaagcttctaagtcttggcattttcattttcaatttaaatctttgctgccttttcaaatatatgacacattaacaacgaggctgacgcaatcgtttgcccacatagcaaaagtgacatcttcaattgaagttcaggatgccgaggtcagtgaaagtatcgttcaagactactggtcacgctgcattgaagaactgcagggcatttcgccgccgattatcagtcttttaaaccagcaaaaaccgaagctgaagggcaataaactgattgtcaaaaccaaaacggatacagaagcggctgcgctaaaaaacaaatacagttccatgattcaagcaggctaccgtcaatttggctttccggatcttcagcttgatgctgaaatatttgtatccgagcaggaagttcaaaagtttcgggaacaaaagcttgcggaagaccaagagcgggcgatgcaggccttgattgaaatggagaagaaagataaagaaagtgatgaagaccaagcaccatctggtcctcttgttatcggttatcaaattaaagataacgaggaaatccggacacttgacagcatcatggacgaagaacggagaattacggtccaaggttatgtgtttgatgtggagacgcgcgagctgaagagcgggcgcacgctgtgtatcttcaaaattacagactatacaaatagtattttgatcaaaatgtttgcacgtgaaaaagaagatgcggcactgatgaagtctctgaaaaaaggaatgtgggtaaaagcacgcggaagcattcaaaatgatacatttgtcagagaccttgtcatgatcgcaaatgacgtaaacgaaataaaagcaaaaacccgtgaagattcagcacctgaaggagaaaaaagagtggaattgcatcttcattccccaatgagccaaatggatgctgttacgggtatcggaaagcttgtcgaacaggcgaaaaaatgggggcatgaggccatcgctttgactgaccatgctgtcgttcaatcctttcctgatgcgtattctgcggcaaaaaagcatggaattaaaatgatttacgggatggaagcgaatctcgtggatgatggcgtgccaattgcttataatgccgcacatcgtctgctcgaagaagaaacatatgttgtttttgacgttgagacgacaggattgtctgctgtatacgataccattattgagctggctgcagtaaaagtaaaaggcggagaaattattgataaatttgaggcgtttgcgaacccgcatcgtccgctttccgccacaatcatagagctgacagggatcactgatgatatgctacaagacgctccggatgtcgtagatgtaataagagatttcagagaatggattggcgatgatatccttgtcgctcataatgcaagctttgatatgggattcttaaatgtagcctataaaaagcttcttgaagtcgataaagctaaaaacccagtcattgatacgcttgaacttggacgttttctctatccggaatttaagaaccaccggttgaacacactttgtaaaaagtttgatatcgaactcacacagcatcaccgtgcgatctatgatactgaggcaaccgcttatttgcttctgaaaatgctgaaagacgcagctgaaaaaggcattcagtaccatgatgagttgaatgaaaatatgggtcagtccaatgcttatcaaagatcaagaccgtatcatgcaacattacttgccgtgaacagcacgggacttaaaaatttatttaagcttgtgtcactttctcatattcattatttttacagagtgccgcgtattccgagatctcagcttgagaaatacagggaagggctgctgatcggttctgcctgtgacaggggagaggtttttgagggaatgatgcaaaaatcgcctgaagaggtggaagatatcgcgtcattctatgattaccttgaggttcagccgcctgaagtgtatcgtcacttgctggagcttgaactggtccgtgatgaaaaagcgctgaaagaaattattgcgaatatcacgaagctgggggaaaagcttaataaaccggttgttgctacgggaaatgttcattacttgaatgatgaggataaaatctacagaaagattttaatatcctcacaaggcggggcaaatccgctgaataggcatgaactgccgaaagtgcatttcagaacgacagacgaaatgcttgaagctttttctttcttaggtgaagaaaaagcgaaggagatcgtagtcaccaatacccaaaaggttgcttctttagttgatgacatcaagccgattaaagatgatttatatacgccgaaaatcgaaggcgccgatgaagagatcagagaaatgagctatcagcgtgcaagaagcatttacggggaagagctgcctgaaattgtcgaagcgcggattgaaaaagagttaaagagtattattggccacggatttgctgttatttacttgatctctcacaaacttgtaaaacgttcactagatgacgggtatctcgttggttcccgtggttccgtaggatcttcattagttgcgacacttactgagattactgaggtaaacccgctgccgccgcactatgtttgtcctgagtgtcagcattctgagttctttaatgacggttctgtcggttctggttttgacctgcctgacaagacatgtcctcattgcggaacgcctttgaaaaaagacggccatgatattccatttgaaacgttcttaggatttaaaggggacaaagtacctgatatcgatttgaacttctcaggggaatatcagccgcaagcacacaattacacaaaagtattgttcggagaagacaatgtatatcgtgcgggaacaataggcacggtggcagaaaaaacagcctacggttatgtaaaaggctatgccggagacaacaatcttcatatgcgcggtgccgaaatagatcggctcgtacagggatgcacaggtgtaaaacgtacaactggacaacaccctggcggtattatcgtagttccggattatatggatatttatgatttttcaccgatccagttcccggcagatgccacaggttcagagtggaaaacgactcattttgatttccactccatccatgacaacctgttaaaacttgatattctcggacacgatgacccgactgttattcggatgcttcaagacttaagcggaatagatccgaaaacaattccgacggatgatcctgaagtgatgaagatcttccagggaaccgaatcactcggtgtgactgaagaacagattggctgtaaaacgggcactcttggaattcctgaattcggaacccgatttgtccggcagatgcttgaagatacaaagccgaccactttttctgagctcgttcagatttcaggcttgtctcacggaactgatgtatggcttggcaatgcacaggagctcatccacaataatatttgtgagctgagtgaggttatcggctgccgtgatgacattatggtttatttaatctatcaaggccttgaaccgtcccttgcctttaaaatcatggaattcgtgcgtaaaggaaaaggattaacgcctgaatgggaagaagaaatgaaaaataacaatgtcccagactggtatattgattcctgtaaaaagattaaatacatgttcccgaaagcccacgccgcggcatatgtcttaatggcagtccgcattgcttactttaaagtgcatcatgctcttttgtattatgcggcttattttaccgttcgtgcagatgactttgatatcgatacaatgatcaagggctctacagcaatcagagcggtaatggaggatataaactctaaaggacttgatgcttcaccgaaggaaaagaaccttctgactgttttagaattagcgcttgagatgtgtgagagaggctattcattccaaaaagtcgatttatatcgctccagcgccacagagtttattattgacggcaacagtctaattccgccgtttaactctattccagggttagggacgaacgctgctttgaacattgtaaaagctcgcgaagaaggcgaattcctctcaaaagaagatttgcaaaagagagggaaagtatcaaaaacgattttagagtacttagatcgccacggctgtctggaatcactgcctgatcaaaaccaattgtcactgttctaatatggaatgcagaatttctcagaaattctgcttctatgcatacataagcgcaaaaagtgccatcgtaatattagagtttctgtcacttgcttaggtatgaaggtaagcgtatatccatttgcaataaaaatatggttatggtatagttttattggaaatgctaacgattaccgaggcaaagagtggggaaacccgctcttttgtattgaacaggagaattttgtctcgacatgttcatcgtttactttttagcccctgctcttttgaagcagggtttttatgcagagtgacgagacgaatatgagatcgacagcacaaggaggaagaacatgagcaaaaaagtgactgacaccgttcaagaaatggctcagccaatcgtagacagccttcagctggaactcgttgacattgaatttgtcaaagagggccaaagctggttccttcgcgtgtttattgattccgatgacggtgtggatattgaggaatgtgccaaagtaagcgaagctttaagcgaaaagcttgatgaggcagacccaatcagccaaaattactttcttgaagtctcatctccaggagctgagcgtccgctaaagaaaaaagccgatttcgaaaaatcactaggaaaaaacgtatacattaagacgtatgagcctattgacggcgtaaaagtgtttgaaggtgaactggctgaatttgatggacaaacagtgacagttgagatcacgatcaaaacaagaaagaaacggatcaatattccgtatgaaaagatagctaatgcaagattagctgttacattctaatgaatacaaatgttttaaggggggagaccgttaaatgagcagtgaattattagatgctctcacgattcttgaaaaagaaaaaggcatcagtaaagaaattatcatcgaagcaatcgaagctgcgttaatttctgcttataagcggaattttaatcaagcgcaaaatgtacgggtggatctaaaccgtgaaactggctccatccgtgtatttgcaagaaaagatgtcgttgacgaagtatacgaccagagattagagatctcaattgaagaggcacagggcatccatccggaatatatggtcggcgatgtcgtcgaaatcgaagttacacctaaggatttcgggcgcatagctgctcaaacagcgaagcaggtcgtcacacagcgtgtgcgcgaagctgagcgcggcgtgatctattctgaatttatcgaccgtgaagaagacatcatgacagggatcgtccagcgtctggacaataaatttatctacgtgtctttaggcaaaatagaagccttgctgccggttaatgagcaaatgccgaatgaaagctacaagccccatgaccgcattaaggtatatatcacaaaagtagaaaaaacaacgaagggcccgcagatttatgtgtcaagaacacatccaggcctgttaaagcgtttgtttgaaattgaagtgcctgaaatttatgatggaactgtcgagctaaaatctgttgccagagaagccggcgaccgttcaaaaatttctgttcgcacagatgatcctgacgtggatcctgtcggttcatgcgtagggcctaaaggccagcgtgtgcaagcaatcgtcaatgaattaaaaggtgaaaaaattgatattgtcaactggtccagtgatcctgtagaatttgtcgcgaatgcgctcagcccttccaaagtgcttgatgtcatcgttaatgaagaagaaaaagcgacaactgttattgttcctgattaccagctgtctctggcaattggcaaaagaggacaaaacgcacgcttagctgctaaactgacaggctggaagattgatattaagagcgaaacggacgcaagagaacttggaatctatccgagagaacttgaagaagatgatgagccgctctttacggagcctgaaactgctgaatcggatgaataagaggtgactttaggtgaataaacacaaaaagatcccattacgcaaatgtgtagtgactggtgaaatgaagcctaaaaaggaactgatccgagttgtacggtcgaaagaaggcgaaatctcagtagacccgaccggaaaaaagaatgggcggggtgcttatttaacgctggataaagagtgcatcttagcagcaaaaaagaaaaacactttgcaaaatcaatttcaatcacaaatcgatgaccagattttcgatgaattgctggaactggcggaaaaggtgaaaaaataaaatgtctggaatggaatggtttcccttgctgggtctggccaatcgagctcgtaaggtcgtgtcaggcgaagacttggtaataaaagaaatcaggaatgcgcgtgcaaagcttgtcctgcttacagaggatgcatcatctaacacagcaaaaaaagtaactgacaagtgcaattattataaagtcccttataaaaaagtcgagagtcgcgcggttcttggacgctctatcggtaaagaagcccgtgtcgttgtcgccgtcactgaccaaggttttgcgaataagctgatcagcttgctcgattaatatttttgggggtgaacgaatggctaaaatgagagtatacgaatatgcaaaagcgttaaatgtttcaagtaaggaaattttgaccgcactgaagaacatggatttagaagtgaataatcacatggccatgcttgaagaaaaggccattaaaaagctagatgccaaatataaaaaaggcggcgcagctgctaaatctcaaaagccagcagaaacgaacaaaaacaaacagccacaaggggttaatcagcaatcagctggaaatcaaccaaataaaattcgagacggaaagaagaatgacgtgcagaataatcaatttaacaaaaacaagaagaataacaacaacaaaaaaaataaacgcaacaacaacaataataaaaaccaacatcagcaaaagcctgtaaagccgaaaaaagagcttcctgagaaaattacattctctggcactttaacagttggcgcacttgctgaagagcttggcaaagagccttcagaactcattaaaaagctgatgcttcttggcgtaatggctaccattaaccaagagcttgataaagacacaatcgaactcattgcatcagaatatggtgttgaaacagaagaggtcattgtgcttgaagaaacagagctggaaaaatacgaagagcctgataatgaagaggatcttgaaattcgtcctcctgtcgtgacaatcatgggccacgttgaccatgggaaaacaacgcttcttgacagcatccgtaaaacaaaggttgttgaaggagaagcaggcggaatcactcagcatatcggcgcttatcaaattgaagagaacggcaagaaaatcacgttcttggatacaccgggccacgccgcatttacaacaatgcgtgcacgcggtgcagaagtaactgatattacgattcttgtcgtagctgccgatgacggtgtcatgccgcaaacagttgaagcgattaaccatgcaaaagcagcagaggttccaatcatcgtagctgtgaataaaatagataaagaatccgcaaaccctgaccgtgtgatgcaagaactgacggaatacggtcttgtccctgaagcatggggcggagaaaccatttttgtgccgctttccgctttaactggaaaaggcattgatgagctcgttgaaatgattttgcttgtcagtgaggtagaggaactgaaagcgaatccgaaccgtcaggcaaaaggaacggttattgaagctgaactcgataaaggcagagggtcagttgcgacgttgctcgtacagactggaacactgcatgtcggtgatccgatcgtagtcggcaatacatttggccgtgtccgtgcaatggtcaacgacattggccgccgtgtgaaaactgccggcccgtcaactccggttgaaattaccggtttgaatgatgtccctcaagcgggagaccaattccttgtctttaaggatgaaaaaacagctcgttctgtcggtgaagcccgtgcttcaaaacagcttgaagagcagcgcagcgataaagcgaagctcagtcttgatgatttattcgagcaaattaagcaaggtgatgtaaaagacatcaacctcatcgtaaaagctgacgttcaaggatctgctgaagctttaacggctgcgcttcaaaaaattgaagtagaaggcgttaaagtgaaaatcatccatacaggcgttggtgcgattactgaatctgacattatcttggcatctgcttccaatgcaattgttatcgggtttaatgtgagaccggacggaaatgctaagagtacggctgaagctgaaaatgtagatattcgacttcaccgtatcatttacaaagtaatcgacgagattgaagctgccatgaaaggtatgcttgatcctgaatatgaagaaaaagtaattggtcaagtagaagtacgccaaacattcaaagtatctaaaatcggtacaattgccggcggatatgttactgaaggaaccattacgcgcgacagcggcctccgtttaattcgtgacggcgtcgtcatctttgagggcgaagtagatgttctgaaacgctttaaagacgatgtgaaagaagtttcacaaggctatgaatgtggtattacaattaagaaatacaatgacattcgtgaaggtgacatccttgaagcgtttgtcatgcaagaaattgaaagaacgtgatcggatttgcggagtgtgaatgcatcatttatgatgcaggatcgctaaaagaaaagcgtgccgttctgaagcgggttttaactagggttcaaaacaagttcaatgtttcgatttcggagattggctatcaggacacctggcaaagaaccagcttcggaatcgccgctgtttcttcctctcgcgttcaaacagaaaaagaactgcagcgcgtcctagcgtttatcgattcttttcctgaaattgaacggacgatcactaggacagagtggttttaacttagaggtgattgaattgagtatgagagcaaaccgtgtcggcgagcaaatgaaaaaagaactcggtgatattatcagccgcaagctgaaagacccgagaattggttttctgacagtaacggatgtacgtgtatcaggtgatttgcaaattgcaaaggtgtatatctcggttctcggtgacgagaaaaaacgggaggaagcgctgaaagggctggcaaaagcgaaaggatttatccgatccgaaatcggcagccgcatcagacttcgaaaaacgcctgaaattgaatttgagttcgatgaatcaatcgattacggaaatcggatcgaaacactgattcacgaattacattcagagaaaccatctgaataaaaaaagagaggataggcgtatatcgtctgtcctctttcttcgtttataagaaaaaaactcaaaagaaggagtgaaaggcaaatggttaacggagttctccttttacataaacctgttggcatgacatcgcacgactgtgtcatgaagatccgaaagctgttaaaaacaaaaaaagtaggacatacaggaacgctcgatccggaagtatcaggcgtgcttccgatttgtgtaggaagagcgacaaaaatagtcgaatacttaactgaaaaatctaaaacgtatgatgcagaaataacattgggcttttcaaccacaacagaggatcaaaccggagaaacggtggaaacaaagcctgtcaatcacgacattgataaagcggatgtagaaaaggttttaaacagtttaaaggggaaacaagaacaaattccgcccatgtattccgctgtaaaagtaaacggcaaaaaattatacgaatacgcaagagcagggattgaagtagaacgtccgaaacgtatgataaccattgaagacattgccctgacaacagagattaaacatcatggagaaaccgcaagcttccggtttacagtgacttgctccaaagggacctatgtaaggacgctggcggtcatgatcggagaaaagctcggatatccggcccatatgtctcatttaatccgtacggcatccggagatttttctctcgacgaatgctttacttttgatgaactcgaagcacaggcccaatccggaaccgtggaagagcatacagttcctattgaacgtgcgctcaatcatttgccgaaatggatcataagtgatacattagctaagaaagtagaaaatggggctttgcttgagacgcccgagcagttttctgaaatgacaagtgaagaccgtattgccgtctttactgaatccggaacctgcttggcgatctatttccctcatcctgcaaaaaaagggctgttaaagccggcaaaagtattgatgcaaaaaagcgaacaatagaaaaaaggtgaccgttctgtgaagacgatacatattacacatcctcatcatttaataaaagaggagcaggcaaaatcagtgatggcgttaggttattttgacggcgttcatctcgggcatcaaaaggtaatcggcacagcgaagcaaatagccgaagaaaaaggtctgacattagctgtgatgacctttcatccccatccttctcacgtgttgggcagagataaggaaccaaaggatctgattacgcctcttgaagacaaaataaaccaaattgaacaattaggcacagaagttctgtatgtcgttaaatttaatgaagtgtttgcttctctttctcctaagcagtttatagaccagtatattatcggccttaatgtgcagcacgcagtggcaggctttgactttacgtacggcaaatacggcaagggaacaatgaagaccatgccggatgatttagacggaaaagctgggtgcacaatggtagaaaaattaacggagcaggataaaaaaatcagttcttcgtatatccgtaccgcgcttcaaaacggagatattgaattggcgaatgtcttgcttggacaaccttattttattaaaggaattgtcattcatggtgataaaagagggcggaccatcgggtttccgacagcgaatgtcggtttaaataacagctatatcgttccgcccacaggtgtatatgccgtaaaagcggaagtgaacggcgaagtttacaatggcgtttgcaatattggctataagccaacgttttatgaaaagcgccctgaacagccttccatcgaggtcaatctgtttgatttcgatcaagaggtatatggagccgctataaaaatcgaatggtacaaacggattcggagcgagcggaaattcaatggcatcaaagaattaacagagcaaattgagaaagataagcaggaagccatccgttatttcagcaatttgcggaaataacttgcaacgcacgcaaattttattctaaaatatttgcatataggcacgatttttagtatgatagttttcgtagtcttaaaaccattgcttggcaatccgaagtcaccgacggttgctaggtaactggggctaaatatgatttggaggtgaaacaggatggcaattactcaagagcgtaaaaaccaactcatcaatgagttcaaaacacacgaatctgatactggatctccagaagttcagatcgctatcctaactgactcaattaacaacttgaacgagcatttacgtactcacaagaaagaccaccactcacgtcgcggtcttcttaaaatggtaggtaagcgtcgtaatcttcttacgtatctgcgtaataaagacgtaactcgttaccgtgagttaattaacaaactaggcttacgtcgataatcgtaaaaagcgggaggattcccgcttttttatcgtattaaagcgaaatttcttataacaaatcattgaaatccttttacatactactttgacattgatatgttcaattcatttcgttcataataggagtaattgattatttcacacaacgaagagaggagttcgtaattgtatgggacaagaaaaacatgtctttaccatagattgggccggaagaacgcttaccgttgaaaccggccagcttgccaaacaggcaaatggtgctgtgatgatccgctacggtgatacagcagtacttagtacagcaaccgcttcaaaagaacctaaaccgcttgatttcttccctcttactgtaaactatgaagaaagattatatgcggtagggaaaattccgggcggatttattaaaagagaaggacgtccaagtgaaaaagcggttcttgccagccgtttaattgaccgtccgatccgtcctttgtttgccgatggattccgtaatgaagttcaagtcatcagcattgtcatgagtgttgaccaaaactgctcttcagaaatggctgccatgttcggttcatctcttgcactttctgtatcggatattccgtttgaaggaccgattgcaggggttactgtcggacgcattgatgatcaatttatcattaacccgacagtcgatcagcttgaaaaaagcgatatcaatcttgtcgttgccggcacgaaagatgcgattaacatggtagaagcgggagcggacgaagttcctgaggaaatcatgcttgaggccattatgttcggccatgaagagattaaacgcctgattgcattccaagaagaaattgttgcagcagtcggcaaagagaaatctgaaattaagctctttgaaattgatgaagagcttaatgaaaaagtaaaagctttggcagaagaggatctgctgaaagccatccaagttcatgaaaagcatgcccgtgaagatgccattaacgaagtgaagaacgcagttgtggcaaaattcgaggatgaagaacatgatgaagacacaatcaagcaagtgaagcagattttatccaagcttgtgaaaaatgaagttcgccgcctgattactgaagagaaagtaagaccggacggccgcggtgtcgatcaaatccgtccgctctcttcagaggttggcctcttgccaagaacgcacggttcaggtctatttacaaggggacaaactcaggccctcagcgtatgtacgctaggtgctctgggagatgtgcaaatccttgacggcttaggtgtcgaagagtcgaaacggtttatgcatcattacaacttcccgcaattcagcgttggggaaacaggaccgatgcgcggaccgggacgtcgtgaaatcggacacggagcactgggtgagcgtgcgcttgagccagttattccgtctgaaaaagacttcccttatactgtccgtcttgtttcagaagtgcttgaatcaaacggttctacatctcaagcaagcatttgcgcaagcacacttgcaatgatggatgccggtgtaccgattaaagcgccagttgctggtattgcgatgggtcttgtcaaatcaggcgaacattacactgtcttgactgacatccaaggcatggaagacgcgctcggagatatggactttaaagtagcgggaactgaaaaaggcgtaacggccctgcaaatggacattaaaattgaaggcctttccagagagattcttgaagaagcgcttcagcaggcgaaaaagggcagaatggaaatcctcaacagcatgcttgcaacattaagcgaatcaagaaaagagctttctcgatatgcgcctaagatcttaacaatgaccattaatcctgataaaatccgcgatgtcatcggaccaagcgggaaacaaatcaataagatcatcgaagaaaccggtgttaaaattgatattgagcaggacggcacaatctttatttcctctacagatgaaagcggcaaccaaaaagcgaaaaaaatcatcgaagaccttgtgagagaggttgaagtcggccaactttacctaggtaaagtgaaacggattgaaaaattcggggctttcgttgaaattttcagcggaaaagacggtttggtgcacatttcagagcttgcgcttgaacgcgtagggaaagttgaagatgttgtgaaaatcggagacgagattcttgtcaaagtcactgaaattgataaacaaggacgagtgaatttatcccgcaaagcggtgctccgtgaagagaaagaaaaagaagaacaacaatcttaaatgaaaacataaaaggagcctgggagacccggcttctttattttgaagcttttcaaaagcaggcgggttctaccttgtccctctccttcataatgtgagatgaggggggacagaacatgtacaaaaaatttgtaccgtttgccgtttttttatttcttttttttgtctcatttgagatgatggaaaatccgcatgcacttgattatataggggcaatgaaaaaagatacggtgactgtcacggcgtcaaaagacccgttatatgaagaattgcttcaaaaagcgccggagtacgaagttaagccccagaatgcaagaattgataaagtgtggaaaagcattccaggctacaatggattaaaggtcaatattgaacaatcatataaaaaaatgaaacagcatggtgagtttcgggaaaaagatttggtgtacagtcaagtaaaaccaagtgttcatcttgagtcacttcagcctgagcctatttataaaggaaatcctgacaaaccgatggtggcttttttaatcaatgtggcatggggaaatgagtatttggaaaaaatgcttcctattctgcaaaagcaccaggttaaagctacgttctttttagaaggcaattgggtgagaaacaatgtacagctcgctaagaagattgcaaaagacggacatgaaatcggaaatcattcatacaatcatccggatatgagcaaactgactacaggaagaatttccgagcagctcgacaagactaatgaacaaatagaacaaacgatcggcgttaagccaaagtggttcgctccgccaagcggaagtttcagaaaagcggttatcgacattgcagcagagaaacagatgggaacagtcatgtggacagttgatacaatcgattggcaaaagccggctccgtctgtacttcagacgagagtgttaagcaagatacataatggtgccatgattttaatgcatccgactgaccctacggcggaaagtcttgaagcgctgattacacagataaaagacaaaggatatgcgcttggaacagtcactgaactaatggatgaaacaagactattgaagtaacagatgaaggcagcttgtctttgaataggaggaacaaatttgattaaacgatatacgtgtcaaaatggtgtaagaattgtgctggaaaataacccgacagtccgttctgttgcgatcggcgtatggatcggcacaggttcgagacatgaaacgccggagataaacggaatttctcactttttagagcacatgttctttaaagggacgagcacaaaatctgcacgcgagatagcagaatcttttgatcgtattggcggccaggtcaatgcgtttacttcaaaggaatatacctgctactatgcaaaggtgcttgacgagcatgcgaattacgcgctggacgtattagcagatatgttctttcattcaacgtttgatgaaaacgagctgcaaaaagagaaaaatgtagtatatgaagaaattaaaatgtatgaagatgcgccggacgacattgtacatgatttactgagcaaagccacttacggcaatcattctttaggctacccaattctaggcacggaagaaacgcttgcttcctttaacggtgactctctcagacaatacatgcatgattattatacgccggaccgagtggtgatttcggtagcgggcaatatatctgacagttttatcaaagatgtagaaaaatggttcgggtcatacgaggcgaagggcaaagcgacaggccttgagaagcctgagttccacacggaaaaactgacgagaaaaaaagaaacagagcaggctcatttgtgccttggatttaaaggcttagaggttggccatgaacgtatttatgatttaatcgtcctcaacaatgtgctcggaggcagcatgagcagccggctgttccaagatgtgcgtgaagataaaggacttgcttattctgtttacagctatcacagctcatatgaagacagcggaatgctaacgatttacggcggaacgggtgcaaatcagcttcagcagctgtcggaaacaattcaagaaacccttgccacattaaaacgtgacggcattacctcgaaagaactggaaaacagcaaagagcaaatgaagggaagcttaatgctgagcttagaaagcacaaacagcaaaatgagccgaaacggaaaaaatgaactgctgctcggcaaacataaaacattagatgaaatcatcaatgaattaaacgccgtgaacttagagcgtgttaacggccttgccagacaattgtttactgaagactatgcattagcacttatcagcccttccggcaatatgccgtcttaaaaaggaaagcctgctccataatggagcaggcattttttaatccctttcatcatacatagtacaagggggtgacagacatgcggctcagtgaattatcaggaaaggaaattgtagacatcaaaagagctgaacggctcggagtgctcggccagaccgatttggaaatcaatgaacaggatggacagattacagcactcctcattcccacagttaagtggtttggtttgagaaagcaaggtcatgacattcgtgtcccatggcaccatattcaaaagatcggttcagatatgattatattagatgtacctgaggaaatgcctcctcgacaagagtaaatagcccaattgactgtgaagcgggctctaaagaaaacatctgaaacatcggctgccggagccgatgtttttttatatggaaaaagcgcatcttttatattcaccggtatttccttttgatcataagatgaaggggagcttaacaactagagatccagtatatacaaagaaggtgaacgtttagaatgttaaccggattgaaaattgcagttatcggcggtgacgcaagacagctcgaaattataagaaagctcactgaacagcaggctgacatctatcttgtcggttttgaccaattggatcacggttttaccggggcagtaaaatgcaatattgatgaaattccttttcagcaaatagacagcatcattcttccagtatccgcgacaacaggagaaggtgtcgtatcgactgtattttcgaatgaagaagttgtgttaaaacaggaccatcttgacagaacgcctgcacattgtgtcattttctcaggaatttctaacgcctatttagaaaacattgcagctcaggcaaaaagaaaacttgttaagctgtttgagcgggatgacattgcgatatacaactctattccgacagtagaaggaacgatcatgctggctattcagcacacggattatacgatacacggatcacaggtggccgttctcggtctggggcgcaccgggatgacgattgcccgtacatttgccgcgctcggggcgaatgtaaaagtgggggcaagaagttcagcgcatctggcacgtatcactgaaatggggctcgttccttttcataccgatgagctgaaagagcatgtaaaagatatagatatttgcattaataccataccgagtatgattttaaatcaaacggtactttctagcatgacaccaaaaaccttaatattggatctggcctcacgtcccgggggaacggattttaaatatgccgagaaacaagggattaaagcacttcttgctcccgggcttccagggattgtcgctcctaaaacagctgggcaaatccttgcaaacgtcttgagcaagcttttggctgaaatacaagctgaggaggggaaataaggatgtcgtcattaaaaggaaaaagaatcgggtttgggctgaccgggtcgcattgcacatatgaagcggttttcccgcaaattgaggagttggtcaacgaaggagctgaagtccgtccggttgtcacatttaatgtaaaatctacaaatacccgatttggagagggcgcagaatgggttaaaaaaattgaagacctgactggatatgaggccattgattcgattgtaaaggcagaacctcttgggccgaagctgccccttgactgcatggtcattgcgcctttaacaggcaattcaatgagcaagctggcaaatgccatgacggacagcccggtgctgatggcggcaaaagcgacaatccggaacaatcggcctgtcgttctgggtatctcgacaaatgatgctcttggtttaaacggaacaaatttaatgaggctcatgtcaacaaaaaatatcttttttattccattcgggcaagatgatccatttaaaaaaccgaattcaatggtagccaaaatggatctgcttccgcaaacgattgaaaaggcactcatgcaccagcagcttcagccgattctagttgagaattatcagggaaatgactaaatttacagaaaatctttcccaaactaaaaaattcggtcatagcccgcatattctatggtaaaataaaacgtaaaatcatagtcaaatcaattcaatgaagctgattggcggaaggagttttacagatgggaagaggtttacacgtagctgttgtcggagcgacaggggctgtgggacaacaaatgcttaaaacacttgaagacagaaactttgaaatggacacacttacattgctatcttcaaaacgctctgcggggacaaaagtcacgtttaaaggccaagagctgactgttcaggaagcttctcctgagagctttgaaggggtaaatattgctttgttcagcgccggcggaagcgtatcacaagcattggcaccagaagctgtaaaacgcggcgctattgttatagataatacgagtgcgttccgcatggatgaaaatacaccgcttgttgtgccagaagtgaatgaggcagacttgcatgaacacaacggcattattgccaatccaaactgctctacaatccaaatggttgcggcacttgaaccgatccgcaaagcatatggcttaaacaaggtcatcgtatcaacttaccaggcagtatcaggagcgggtaatgaagctgtaaaagagctttacagccaaacacaggcgattttaaataaagaagaaatagagcctgagatcatgcctgtaaaaggtgacaaaaaacactatcaaatcgccttcaacgcgattccgcaaatcgataaattccaagataacggctatacgtttgaggaaatgaaaatgataaatgaaacgaaaaaaatcatgcacatgcctgaccttcaagtagcggctacatgtgtgagactgccaatccaaactgggcactcagagtccgtctacatcgaaatagaccgtgatgacgctacagttgaagatattaaaaatctattgaaagaagctccgggcgtgacacttcaggatgatccaagccagcagctttatccgatgcctgctgatgctgtcggcaaaaacgatgtgtttgtgggccgcatccgtaaagacttggacagagcaaacggttttcatttatgggttgtttctgataacctattaaaaggcgcggcatggaactctgttcaaattgcagaaagcctgaaaaaactaaacctcgtataaaagagagaattttctaaagacgaatagaagagagtaaggcgctatcagcctgctctcttctgttacgtccgaataatttggagtgaaaacagtgaagataattgttcaaaagttcggcggaacatcagtaaaagatgataaaggccgcaaactggctttagggcatattaaagaagcaatcagtgaaggatataaggttgtcgttgtcgtttcagcgatgggccgaaaaggagacccgtatgcaacagattctttacttgggctgctttacggcgatcagtcagcgatttctcctagggaacaggatttgcttttatcttgcggagagactatttcctctgtcgtctttacaagcatgctgcttgataacggtgtgaaagcagctgcgctgacaggggctcaggctggctttttaacgaatgatcagcataccaatgcgaaaatcattgaaatgaaaccggagcgtttattcagtgtgctcgccaatcatgatgcggtagtcgtcgcaggcttccagggcgcaactgaaaagggtgatacaactacaatcggcagagggggcagcgatacgtctgcagccgcactcggagcagctgttgatgcggaatacatcgatattttcaccgatgtagaaggcgtgatgactgctgacccaagagtggtggaaaatgcaaaaccgcttcctgttgtgacgtatacggaaatctgcaacctggcgtatcagggggccaaggtcattcatccgcgtgctgtggaaatcgcaatgcaggccaaggttccgatccgcgtccgttcgacttattcgaatgataaaggtacattggtgacatcacatcactcttccaaggtcggcagtgatgtttttgaaaggctgattacgggaatcgcccatgtcaaagatgtcacgcagttcaaagtgcctgcgaaaatcggccagtataacgttcagactgaagtgttcaaggctatggcaaacgctggaatcagtgtcgatttctttaacattacacctagtgaaatcgtctatacggtagccggaaataaaacagaaacagctcagcgtattttaatggatatgggctatgatccaatggtgacgagaaactgcgcgaaggtatcggcggtcggcgcgggcattatgggtgttcccggtgttacgtccaaaattgtatcggctctttcagaaaaagaaattccgatccttcagtcggctgacagccatacgacgatatgggtgctcgtccatgaagcggatatggttcctgctgtaaacgctttgcatgaagtgtttgaactttcgaagtaaatgtgattgaatcatgatgaggtgaataaaatgaatttcggaaatgtgtctacagcgatgattacaccctttgacaataaagggaacgtagactttcaaaaactgtctacactgattgattacttgttgaaaaacggaacggattctttagtagtagcgggaacaactggagaatctccgaccctttcaactgaagaaaaaattgcgctttttgaatatacagtaaaagaagtaaacggacgggtgcccgttatcgctggtactggaagcaacaacacgaaagattccattaagctgacaaaaaaagctgaggaagcgggcgtggacgctgttatgcttgttaccccgtattacaataaaccttctcaagaaggaatgtaccagcattttaaagcaattgcggcagagacatctcttccggttatgctctataatgttcctggccgtacggttgcttctcttgctcctgaaacgacgatccgtttggcggcagacattccgaatgtggttgcgattaaagaagcgagcggagacctcgaagcgattacaaaaattattgctgaaacacctgaagacttctatgtctattcaggggatgacgctctgacgcttccaattctttcagttggaggaagaggagttgtgtcagtggcgagccatattgcaggcactgatatgcagcaaatgatcaaaaattatacgaatgggcaaacagctaatgcggcactgattcatcagaaactgctgccgattatgaaggaactgtttaaagcgcctaatcctgctccagtcaaaacagcgcttcagctgagaggtcttgatgtcggttctgtgcgtctgcctctagtcccgttaactgaggatgaacgtctgagcttaagcagcacgatcagcgaactgtaagaaaatttcatacagtgaaacaaacgcggtcattctcacattcagctgagtttgaccgtttcttttacatattggttttccctaaaccttctgctttatcttgttttctaaatttactttcagttataataggaacaagtgatgatggacgggtatgagactaggaggatatagattttgaaaaagaaaaatacagaaaacgttagaattatcgcccttggcggtgtcggagagattgggaagaacctttatgtcattgaaattgactcagacatatttgtcgttgatgccggccttatgcatccagaaaacgaaatgctcggtattgatgtagtgattcctgacatatcatatttgattgaacgggctgaccgcgtcaaggcaatctttttaacgcacgggcacgatgaaaatatcggcggcgttttttacttattaaacaagctgtccgttccagtgtacggaacaaaattgacgcttgcactgttaagagagaaattaaaacaatacggacataaccgaaaaactgatttaagagaaattcactccaaatctgtcattacatttgaatcaacaaaggtatcgttctttagaacgattcacagcattcctgattctgtaggtgtgagctttaaaacatcacttggatctattgtatgcacgggagacttcaaatttgaccaaacacctgcacttaatcagacgtgcgacattggcgagatcgccaagatcggcaatagcggcgtgctcgctctgctttctgacagtgcaaatgcggaacggccgggttacaccccttcggaagcggctgtcagcggagaaatttcggatgcgctgtataattcacagaaccgggtgattattgctgttttcgcatccaatattaaccggattcagcaagtcattcatgcagcggctcaaaatggcagaaagattgccgtagccggaaaaaatcttcaatctgtcctgcagctggcgagaaagttaggatacattgaagcagatgatgaattgtttatttctgtacaggatgtcaaaaaatatccgaagcgcgaagtggccattattacagccggaagccaaggtgaaccattagctgctttgacaagaatggcaaacaaagctcacaaacagctgaacattgaagaaggggatacggtggtcattgcgtcaactccgattcccgggcaggaactcatttactctaaaacagtagatcttcttgcgagagccggtgcacaagtcatctttgcccaaaagcgtgttcatgtatcaggccacggctcacaagaagagttaaagctaatgatcaacctgcttaaaccaaaatatttgattcctgtaaacggcgaatacagaatgcaaaaagctcattcaaaaatcgctgaagaaaccggcatgaagcgcagcgacatcttcttaattgaaaaaggcgacgtcgttgaattccgcggccaaaacgtaaaaattggggataaagttccttacggcaatattttaattgatggtttaggtgtcggtgatatcggcaatatcgtattgagagaccgccgcttgctttcacaggacggaattttaatcgttgtcattacacttgataaacaaaagaaaaatcttgtatcaggaccagaaattatcactcgcggctttgtttatgtaagagagtctgaaggtctaatcgtacaggctactgagctcgtccggtccatcgtgacagaagcgactgaaacatcaaatgtcgaatggtcaacgctgaagcaggcaatgcgggatgctttgaaccaattcctttatgaaaaaacgaaacgtaaaccgatgatcatcccaattattatggaagtataatgactgactaaagaccggagttgctccggtctttattttttgtccttcaagccgggattgaatgaagtatctttgttcataatacaaagagaaactcggaaaggatgaaagcgagatggatcatcgtatggaaaacacagaagaagagcgtcctgaaaaaaatgatgcgaaggacagcattatgaataaaatacagcagcttggtgaaacgacgcttccgcagctgccccaagatacaaatattcattgtctgaccattatcggacaaattgaaggccatgttcagcttcctccgcaaaacaaaacaacaaaatatgaacatgtcatcccgcagattgtggcaattgaacaaaatcccaaaattgaaggcttgctgatcatattaaatactgtcggaggagatgttgaagctggtcttgccatagcggaaatgcttgcatctttatcgaaaccgaccgtttctatcgtgcttggcggggggcattccatcggcgttccgattgctgtatcctgtgattacagctatatcgccgaaacagcaacgatgacgattcatccagttaggctcaccgggctggtcatcggggtgccgcaaacgtttgaatacctggataagatgcaagaaagagttgttaaatttgtgacaagccattccaatataaccgaagagaaatttaaagagctaatgttttcaaaaggaaacttaacacgcgatatcggaacaaatgtagtcggtaaggatgcagttaaatacggattgatcgatcacgcaggcggtgtcggacaggcaatcaataaactgaatgagctcatcgacgaagcaaggaaagaagaaggacggatgattcaatgattctttataccgtgatgccgcaggaaattgtgtttgcagaacagaaccaagagacaagcgcacatgagcaaattgaatataaaggtgtaccgcttctagtcgaaatgaaagggaatgaagcggaagtcattcaaatcatgagcaccaatccaatgcattttctgcatccggacatttcacccggacaaaagctgaaattaaacgtataagaatccaacccttttttaagggcaaaatatgctataataggggaatcctacagaaaaaacgcagcctgtaaacggctgctttcttcattatgtatgaacttacattttttaacgcagtaaggtgatgagtgtggcaaagaaaaaacgaaaatcaagaaaaaaacaggcgaaacagctaaatataaaatacgagctcaacggattgctgtgtatagccatttcaattatcgcaatcttgcagctgggggtagtcgggcaaacgtttatctatttgttccgcttttttgctggagagtggtttattttatgcttgttaggtttattggtgttaggagtctcactgttttggaagaaaaaaaccccaagccttttaacgagacgaaaggccgggttgtactgtatcatcgcaagcatattgctgctttctcacgtgcagctatttaaaaatttgacgcacaaagggtctattgagtctgcaagcgtggtgcgcaatacgtgggaattgtttttaatggacatgaatggcagctctgcttcacctgatttaggcggagggatgatcggtgcgctgctgtttgcggcttcacactttttgtttgcgtcgactggttctcagatcatggcaattgtcatgattttgatcggaatgattttagtaacaggacgctcgctgcaagaaacgctaaaaaagtggatgagcccgattggacgttttataaaagaacaatggttagcatttattgatgatatgaaatccttcaaatcaaatatgcagtcatcgaaaaaaacgaaagcgccgagcaaaaaacaaaaaccggcccgcaaaaaacagcaaatggaaccggagcctcctgatgaagagggggattatgaaacagtatcgcctcttattcattcagagccgattatctcaagcttttctgatcgtaatgaagaggaagagtctccagttatagaaaagcgccccgtacctgtgtcgaagccgcttcaggacatccaaccggagacaggtgatcaggaaactgtttctgctcctcctatgacctttacagagcttgaaaataaggattacgagatgccgtcactggatttgctggcagatccgaagcataccggccagcaggctgataaaaagaatatttatgaaaatgccagaaagcttgaacgcacattccaaagctttggcgtaaaggcgaaagtcacacaggttcatctcggaccggctgtaacaaaatatgaagtatatcctgatgtcggagtgaaggttagcaaaattgtcaatttaagcgatgatttagcgcttgcgcttgctgcgaaggatatcaggatcgaagcgcctataccaggcaaatcagcaatcggaattgaagttccaaacgcagaagtggcaatggtttcgctgaaagaagtgctggagtctaaattgaatgacagaccggatgcgaagctgttaattggactcggccgcaatatttcaggtgaagctgtattggctgagttaaacaagatgccccaccttttggtcgcaggcgcaaccggtagcgggaaaagtgtctgtgtcaacggcattattacaagtattttaatgcgggcgaaaccgcatgaagtgaaaatgatgatgatcgatcctaaaatggtagagctaaatgtctacaacgggattccgcatttgcttgctcctgttgtaaccgatccgaaaaaagcgtcgcaggctttgaaaaaggttgtcaatgaaatggagcggcggtacgaattattttctcatacgggtacaagaaatattgaaggatacaatgattatataaaacgcgccaacaatgaagaaggagcgaaacagccagagctgccttatattgttgtcattgtggacgagctagccgatctcatgatggtcgcttcatctgatgtggaagattcgattacgagattgtcccaaatggcgcgggctgccggcatccatcttattattgcgacacagcggccatcggtggatgttatcacaggggtgatcaaagcgaacattccgtcacgaatcgcgttcagcgtatcttcacagacggattcaaggaccattcttgacatgggtggcgctgagaagcttcttggccgcggcgatatgctgtttttacctgtaggggctaacaaacctgtccgtgtgcagggagcatttttgtcggatgacgaagtggagaaggtcgtcgaccatgtgattacgcagcagaaagcgcaatatcaagaagaaatgattcctgaggagacaacagaaactcattccgaggttactgatgaactttatgatgaagctgttgaattaatcgtcggcatgcagacggcatctgtttcaatgctgcaaagaagattcagaatcggctatacgagagcggcgcgcctgattgacgcaatggaggaacgcggtgttgtcggaccgtatgaaggcagcaaacctagggaagtattattatcaaaagagaaatatgatgagctctcttcttaatgaagggagttccgctctctatagttgtcaataataacattatgtaaactgatcacctttctatttattttttcgacaaaacatgatatagttgtcccaattgttcaataatttttatcgaaagtggtttacggaggggaaacatgtctacaaaagctgataatcggcacttgtatttgaaagtaattgaacgaattaaagaggatataaaaaatgggatctacactgagaaggaaaagctgccttctgaatttgagctttccaaaaagcttggtgtcagcagagcgacgctaagagaagccttgcggatactggaagaagagcatgtgattatcagaaggcatggtgtaggcacttttgtccattctaagccgttatttctttcgggcattgaacagctgaacagtgtaaccaagatgatagaacaggcgaatatgacccctggcacgatttttctatcatcacaagtgcttatgccgtctgaagatgatacgaagagatttcatttggcagaagggcaagaacttttttaccttgaacgagtcaggacagctgacggacagccgattgtgtattgtatagacaaaattccgatgaatattttgccgaattctttttctcatcagcaagaatctatgtttgaccttcttgagaaaaattcaggctccgtaatcagctatgcagtaactgatatagaaccgatcggctatcacgataccatttctccagtgcttgaatgcgatcctgaaacagcccttttgctgttaaaacaaacccattacgatcagcacgataaaccggtgctttattctttaaattattttagagcggataaattcagatttcatgttttgcgtaaacgattctaaaaacggacgcctgtatgtgtctgtttttttatttgcactgattcatgtttctttgtacatactttcattccggttaacgcaatatataagggatgacaagaaagtgaatgggtgaaaatgttgagagagaaaaatggaatgaaaaatattattgcattgtcttctgtcccgcttgtgatgacactcgggaactccatgctgattcctgttcttccgatgatggagaaaaagctgtctgtgacttcatttcaagtatctttaatcattactgtatattcagtagtagcaattatttgcattccgattgccggatatttgtcggatcgtttcgggagaaaaaaaatattgcttccatgcctcctcattgcaggattggggggagccgtagctgcttttgcctcgacctatatgaaaaatccttatgctatgatcttggcggggcgggttcttcaaggcattggttctgcaggtgccgctccgattgtcatgccgtttatcggcgacctgtttaaaggagacgatgaaaaggtcagcgcgggtcttggcgatattgaaaccgccaacacgtcagggaaggtactgagtcccatacttggagccttactggcttcttggtattggtttgtaccgttttggtttattccgtttttctgtttgatcagctttttgctcgtattgtttttggtggccaagcctgaagaagatgaagatgcgcctgctgtttctgagtttattaagagtgtgaagaaaatttttaaacaggatggtcgctggctttatacggtcttcattatcgggtgtgtcattatgtttttgttatttggcgtattattttatttatcagatacgctggagaacaagtatgctattgacggagtagctaaaggcggattactggcaatcccacttttgtttttgtcaaccagttcttttatagctggcaaaaagatcggtaaagataaaggccgaatgaaattttgcgttgttacaggaatgattctgttaaccctttcgtttattgccttgtggtggaaccacagtttttattttttatttgtctttttaagctttggcgggattgggattggaatggctcttcctgctttagatgcattgataaccgaagggattgaaagtgaacaatgcggaaccatttcctccttctacaatagcatgcgctttataggagtagctctcggtccacctgtttttgctgcattaatgtctaatgcaaactggattattttcatactctcggcgttttgcagcatcgtttctttatttttagtgctctttactgtagatgctaaaaaaagtgaagaagaagaaaaaaacttagggacggtctagccagccgtctttttttgcgcttccttgcacagtttacaactgtacctatacagcatgcggaggttattgtttccttataaatcctacagttgctataattacatgaaagagtgtttctgcgaatgctgaaaattggtcataatacatactaattaagaaatgaacgaaggaggttccatatgtcatatgttaatgaactcaaatcaaagcacggcggtttaaccgcacacattgtaaaaacagaaaaattcaaaaccgtctcgcttatttttaagatgcttgcgccgctgacaaaggatcaagtcaccaaaagagcgctgcttccgcatgtgcttcttcgcggaacgaaaagccatccgaaaaccgcagaattgcgttcatacctggatgagctgtacggcacgtcagtatcggctgaccttacgaaaaaaggagagcggcacgtcattacgttcaggcttgaaatcccgaatgaaaaatatttaaaagaccaaacgccgctacttgagaaagggctccagcttcttgcagaaatcgtcttttcacctgctttagagggagacgcttttcagtcacaatatgtggctcaagaaaaacggacgcttaagcaaagaatccaagccgtctatgatgataaaatgcgctattcgaatttaaggctgatacaggaaatgtgcaaaaatgagccttacgcgcttcatgtcaatggtgaaatcgacgatgttgatgacattacggcagagcaattatacgaaacataccaaagcgctatccaaaaagaccagcttgatctatatgttgttggcgatgtggacagtaaccaggtacaatcggcaattgataagtatttcaaaacagaagagcgcactcttggcacgattgaaaacaatcacgctgatgaaaaagttcagccaaaagaagtaattgatgaagaggatgtcaagcaaggaaaactgaatatcggctaccgcaccagcatcacttatacagatcaggattatcctgctttacaagtgtttaacggattgttcggcggattctctcattctaaacttttcattaatgttcgggaaaaagccagtcttgcttactacgcggcttcccgtatagaaagttttaaaggcttgttaatggtgatgtcaggcattgaagtgaaaaattttgaacaggcggtttcgattattgctgagcaattccaggcaatgaaaaatggcgatttcagtgagcaggatatagcacagacaaaggccgtcattcgaaatcaagtgctggaaacgattgatacagcatacggtttatctgaatttttatatcagcaggctgctgctcaagtcgagattcctatcgaagactttcttgccaatattgagaatgtcacaaaagaggatatcattaaagccggcgaaaagattcagcttgatacgacttatttcttaaaagggacggagggtgcatcttgatcaaaccaatcgaatatgaacagcttcaggagacgctgtatcatgaaaaaatgtccaacggccttgatgtttacgttttgccgaaaaaaggcttcaacaagacatatgcggtctttacaacaaagtacggctcgatagataaccggtttgtccctttaggtaaaaacgagatggttcacgtgccggacgggattgctcactttcttgagcacaagctgtttgagaaagcggacggagacgtttttcaagatttcagtaaacagggggcttctgccaatgcgtttacgtcatttacaagaacggcttaccttttctcaagcacatcaaatgttgaacgcaatttagagacgcttatcgattttgtacaggacccatattttactgaaaaaacggttgaaaaggaaaaagggattatcgggcaggagattaatatgtacgacgataaccctgattggaggctttacttcggggtcattgaaaacatgtacaaagagcatcctgtcagaattgacatagcgggaacagtggaaagcatttcacatattacaaaagaccttctttatgaatgctatgaaacgttttatcacccgagtaacatgctccttttcattgtcggccctgtagatcctgaagcgattatttctcaggtaagagaaaaccaggggaaaaagccgtatactgatcagccggagatcaaacggaaagaagtgaaagagcaagaagcggttttccgaaaagaaaaagagatcaaaatgaacgtgcagggaccgaaatgccttgttgggctgaaatccaaaaatccgtttaaattaggcaaagagctcttaaagcatgaactttcaatgaacttattgcttgaagctctttttggcaaaagctctgcccagtatgaatcactttatgaaaaaggatatattgacgaaacgtttagctttgattttactgctgaatatgggttcggttttgcggcgatcggcggagatacgcctgagcctgatcaattagctgaagacatttcaagcatgcttttgcgcgccggtgaactgattactgctgaaaagattgaacttgccagaaagaaaaagatcggcacattcttaaaagcgctgaattcccctgaatacatcgccaatcaatttacccgttatgcgttcttggatatgagcctgtttgacgttgtaacggtactcgagcagattaccctcgaggatgtccagaacgtaatacaagaggaaatcgctgcagacaggctgactgtctgcaaggttgttcctaaatcataaacaaaacatccctccagtgtgaggggtgtttttctgcggaaagaaggaaagagaatgaacaaaacagcactaatcaccggagcaagcggcggcattggcaaaagcatcagcgaaacccttgcggctaaggggtacaatctgctgctgcattacaatacaaatcaaaatgcggcagcggagcttgctgaaaaactaagtcagatgtttggcgtaaatacggagatattacaagctgatctgtccgcgcaagatggagcagataagctgacaagttcaattgttcagccggttgatgcgattgttttaaacagcggacgaagccattttgggctgattacggatgtagataacgcaacggttcaggaaatggttcagcttcatgtagcgagtccgtatatgctgacgagaaaccttctgccaggcatgattcggaataaatcgggagcgattgtggctgtcagctcgatttggggagagactggggcatcctgtgaagtgctgtacagcatggcaaaaggagctcagcattcgtttgtaaaaggattggctaaggagctggcgccaagcggaatcagggtaaacgcagtagcgccgggcgcagttgatacaaatatgatgaatcaatttaccccggctgaaaaagaagagatcgctgatgagattccgatcggccggctggcccggccgcaagaaattgcggatgcaacagcttttctcctgtctgaaaaagcgtcatatatcaccggccaaattctgtcggtgaatggcggctggcactgctgatccgaaaatattcggtgtatagtttcttttgcgaaggacacaataatcttgtaacttcacatgaaatggaggaaacaagcatgtcagtattagaaaactgggatagctggaaaaacttccttggcgaccgtctaaactatgcgcaagataaaggtatgagccaggatacgattacagatcttgcgacagaaatcggcagctacttggctaatgaagtggaatctaagaacgagcaggaaaaagtgctggcagatctttggagtgtagcatcaaaagatgaacagcacgccattgccaatatgatggttaagcttgttgaaaataacagcactcactaggaagagaggggatttttcctctcttttttatgttttcctcatcacagcaacattcttctttctaattagagaaaaatgctttatgataaaggaaggtaaaattttgccacaatgaagggggtatatcatttggcaaagctcgaatggtattttgaatatgaaattcaagtgaaccgccccggactgctcggggatatttcatctcttcttgggatgctttctatcaacatcgtaacgataaacggcgtcgatctttccagaaggggaatgctcctcaggtgccgccatatagatcaaattaaacgattagaatcaatcttaaaaacgatggaaacaattaaagtaacgaagcttagagaaccgaggcttcgcgaccgtcttgccgtacgccacggccgttatattcaacgggatgccgatgacaagaaaacgttccgctttgaacgggacgagcttggcttattagtcgattttatggccgaattgttcaaaaaagaaggccataaattaatcggaatcagaggtatgccgcgtgtggggaaaacggaatcgattgtagcctctagtgtgtgtgcaagcaaaaggtggctgtttgtgtcatcaaccttgctgaagcagacgataagaagccagctgattgccgatgaatacagcactgaaaatgtctttatcgttgacggaattgtgtcaacacgaagaggatcggaacgccatctccagctggtccgagaaatcatgcggctgcctgcaacaaaagtggtggagcatccggacatattcgttcaaaatacagagtatacattagatgactttgattatattattgaactgagaaatgaccctgatgaggttattacatatgaacatgccgaggaaccccaaatgtttgatcaatccgggttttcaagctttgatttttaaaattggaaggtgtttgttgtgactgaactaggaatccggctcaaagaagccagagaggaaaaagcaatgtcattggatgatctccaagcggcaacaaagattcaaaaaaggtatttaaccgccttggaggaaggaaactatgacattattccggggaagttttatgttcgggcattcatcaagcaatatgcagaagccgttgggcttgatgcggatcagctgtttgaggagcataaaaaagatatccctaatacgtatcatgacgatgtgtctgaaaagatctccggcatgaatcttcaaaaggaaatgccaaagccagcatctaaggcgctggagctgctgccaacgatacttgttattctcggcgtgattgttgtgattgccattgtgtacgcgatcattcaatttgccaatcacaaaaacagtgatgatcacaatgcggcatcagaaaaagcaattacgcaaagtgagagcaaatacgaaatccctaaagattcaacgctgaaagagaatcaaaataacagctctgaaaaagagacagacactaaaaaagaaacgaaagaaaacgaagataagaaaaaagaaaatgacagtgagaagctggagattaaagctgctggcactgaaggatcgttaacgacttatgaagtgtccggcgctgataaaatcgagctggaactgaaggcatcagacagctcgtggattcgagtgcgcgatgaaaacagcagctctttaaaagaaggaacgctgaaaaaagacgaaacctataaaaaagacataactgatcagaaacaagttgatatccgcaccggatatgcacctaatctgaaaataaaaatcaacggtaaggttctttcatatgaacttgatccgaaaaaagtgatggcacaaaccataaagattgtaaataaaaaggaagaaaagtcatcttaattatcagatgacttttcttcacgtccgagtatgaaattggaggggctttatgtttaacttaccaaataaaatcacactagctagaatcgcattaatcccaatcttcatgattatcatgctggcgccgtttgactggggcaggctcgaagttggagacgaatcaatcccggtcgcacatttggcgggggccattctatttattattgcatctacaacagactgggtggacgggtattatgcccgaaaattgaatctcgtaacaaacttcgggaaatttcttgatccgcttgcggacaaactgctcgtatccgcagcgttaattatccttgttcaatttgatctcgctccagcttggatggtcattgtgattatcagcagggagtttgccgtgacaggtttaaggcttgttttggccggaacaggagaagtcgtagctgctaacatgcttggtaaaatcaaaacctgggcacagattattgcggtatccgcattgcttcttcataatcttccatttgaacttgtgtcattcccgtttgcggacttggcgctgtgggtagccgtcttctttactgtcgtttcaggctgggaatatttctctaaaaactgggaagcgttaaaaacatctaactaagaaagaaggacttcgtcatggaatttccaaaaaaagcagaaataattgcagtcggttcagagctgctgcttggccaaatcgccaatacaaatgctcaatttatcagcaaacagctcgctgaaatcggggtcaacgtattttatcatacagcggtcggagataacccggagcggctgaagcaggtcatccgcattgctgaagaacgctctgacttcattattttttcaggagggcttggacccacaaaagatgatctgacgaaagaaacgattgcaaatacgctgggacgtccgcttgtgttaaatgatgaggcattccaatccattgaggactatttcaaacgaacaaaacgcacgatgtcacctaataaccgaaaacaggcgcttgtgatcgaaggctctgacgtgctggcgaatcactttggaatggccccgggaatgctcacagagcatgaatcgcgctattatatgcttcttcctggaccgccgagcgaattgcgtccaatgtttgaaaacgaggcaaagcctcttctgctgaaaaagatgggttcaaatgaaaaaattgtgtcaaccgttcttcgctttttcggtatcggtgaatctcagcttgaagccgatttggaagatattattgatgcacaaaccaatccgacaattgcgcctttggcggctgatggagaggtgacgctgcgtctgacagccaaacacgccgatgaaaaggaaacagagcgtctgttaaaagaaacagaggccgttatcttagagcgtgtcggtgaatttttctatggttacgatgatacttctcttgtaaaagagctatctatagcgtgtaaggaaaaaggcataacaatttctgcggcagaaagctttaccggagggctgttttctgaatggctgacggatcatagcggtgcctcaacattatttgccgggggcgttgtttgctatacaaacgacgtgaagcagaatgtgcttggtgtcaagaaggaaacattagatcgttttggggcggtcagcaaggagtgcgcatccgaactggctaagggtgttcaaaaactcactggcagcgatatcggcattagctttactggtgtagcaggacctgatgctcaagaagggcatgagcctgggcatgtgtttatcggcatttccgcaaacggtaaagaagaggttcacgagtttcactttgcgggctccagaacggggatcagaaaacgcggcgctaaatacggctgccatttaatcttaaagcttttagagcaaaaataatattttcagcacattatcctcctaagaaaacatgatttctctgatacattatgatattttgataggaatcacgccaagaaaaaatccgaatatgcgttcgcttttttcttggcaaatcccttcaaacagggtatagtatatgtagtggtaacataaaggaggaaaaaatagaatgagtgatcgtcaggcagccttagatatggctcttaaacaaatagaaaaacagttcggcaaaggttccattatgaaactgggagaaaagacagatacaagaatttctactgtcccaagcggctccctcgctcttgatacagcactgggaattggcggatatcctcgcggacggattattgaagtatacggtcctgaaagctcaggtaaaacaactgtggcgcttcatgcgattgctgaagttcagcagcagggcggacaagccgcgtttatcgatgcggagcatgcgttagatccggtatacgcgcaaaagctcggtgttaacatcgaagagcttttactgtctcagcctgacacaggcgagcaggcgcttgaaattgcggaagcattggttcgaagcggggcagttgacattgtcgttgtcgactctgtagccgctctcgttccgaaagcggaaattgaaggcgacatgggagattcgcatgtcggtttacaagcacgcttaatgtctcaagcgcttcgtaagctttcaggggccattaacaaatcgaagacaatcgcgattttcattaaccaaattcgtgaaaaagtcggtgttatgttcgggaacccggaaacaacacctggcggccgtgcgttgaaattctattcttccgtgcgtcttgaagtgcgccgtgctgaacagctgaaacaaggcaacgacgtaatggggaacaaaacgaaaatcaaagtcgtgaaaaacaaggtggctccgccgttccgtacagccgaggttgacattatgtacggagaaggcatttcaaaagaaggcgaaatcattgatctaggaactgaacttgatatcgtgcaaaaaagcggttcatggtactcttatgaagaagagcgtcttggccaaggccgtgaaaatgcaaaacaattcctgaaagaaaataaagatatcatgctgatgatccaggagcaaattcgcgaacattacggcttggataataacggagtagtgcagcagcaagctgaagagacacaagaagaactcgaatttgaagaataaaaataaaataagtttcaaatgatacaaaaggctgagtgaaaaactcagcttttttgtattttgcaaaaaaatgataaaaatattgctttttttgacaacttttttagggctttattcgtctaacaaaacgtgtgcaaaatggaatttattttgggaggaaaaaatgaatgacaagcccaacccgcagaagaactgcgaaacgcagacggagaaaactaaataaaagaggaaaactgttgcttggtcttttagcagtgatggtttgcattacgatttggaatgctcttcatcgaaatagtgaagaaaacgaaccatctcaagaaactgcagcggtttcaaataccgatcagaaaaaagaggtcaaaaagaaaactgccgaaaaatcagaggaacaaatcaaaacagtggatcgaaaccaaaaaatcagcaattatttaaaagagatcggtttcagcggaacagccatgattgtcagaaatggagaaatcgtaacaaataaaggttttggctatgctgaccgtaaacactacattcaaaataatccattgacatctttttatgtcggttcatcacaaaaagcgctaattgcaactgctattttgcagcttgaggaaaaggggaaacttcagacaagtgatccggtaagtacgtatttacctcattttcctaacggacaaacgattactttgaagaatctgcttacacatacatcggggataaacggacatattgaaggaaacggcgccattactccggacgatttaataaaagatatagaacttcagggaatcaaacgtcagccgggcgtatgggactacaaggattccaactattctgttcttgcttatattattgctgaagtaagcggtgagccctatgaacagtacataaagaatcatatttttaaacctgcgggaatgacgcatgcaggcttttacaaaacatatgaaaaagaaccttatcctgccgtcgggtataagatggagggcagcaaaacagttacaccgtatatacctgatttatcccagctgtatggagcgggtgatatttatatgagcgctatagatatgtacaaatttgaccaagcgctgatagacggaaaactgtattcgcaaaaaagctatgaaaagatgtttacgccagggagcagctccacatacggcatgggattttatgttgctcccggaagctattcaaaccatggtgttatgccgggcttcaatatcttgaacagctttagcaaatctgggcaaaccattgttattttgttctcaaacattcaaaataatgctaaattgggccaagtgaacaataaaatataccagcttctaaatcaagaatgattggcgatcttcttttggatgaattgcattcggcacgtgaaaagaagactggcctgcaaacgttaagatggcaagcttgacaagtatttccgacacatttacaatgaagttgtaacatttgtttttttaacatgattgttaaaccatttaaacttgacaagggcgatgaacacactcattccctgtgaaggttctgtatgttgagaaaactagacaatgtacatgccgacactttttaagcaacaaccaagttcatagcaagaggaggtgaaagtatgaccccaattatgatggttctcatctccattttgctgattctactcggtttagttgttggctactttgttcgtaaaaccattgccgaagcgaaaattgcgggcgcacgcggtgcagccgagcaaattcttgaagatgcgaagcgtgatgctgaagcactgaaaaaagaagctctgcttgaagcaaaggatgaaatccacaaacttcgaatagatgctgaacaggaagttcgtgaaagacgaaatgagcttcaaaaacaagaaaaccgtttactccaaaaggaggaaaaccttgatcgcaaacatgagggaattgataaacgggaagcgatgttggagaagaaagatcattctctgaatgaacgacaacaacatattgaagagatggaaagcaaagtggatgagatgattcgtatgcagcagtctgagttggaacgaatttcgagtctaactcgtgacgaagcgaaacaaatcattcttgagcgggttgaaaacgagctttcacatgacatcgccatcatgacaaaagaaactgaaaaccgtgcgaaagaagaggcggataagaaagcgaaaaacattctttcactcgccttacagcgctgcgcagcggaccacgttgccgaaacaacggtatcagttgtcaatcttccaaatgatgagatgaaaggacgtatcatcggacgggaagggcgtaacattcgtacgcttgaaacgctgacaggaattgacctgattattgatgatacgcctgaagctgtcattctttccggatttgatccgatcagacgtgagacagccagaattgctcttgataaactcgttcaggatggccgtattcatccggcacggattgaagaaatggttgaaaaatctcgccgcgaggtcgatgactatattcgtgagatgggtgagcaaacgacatttgaggttggcgttcatggcctccacccagatctcatcaagatcctcggccgcttaaagttccgtacaagctacggtcaaaatgtgcttaagcattccatggaagtcgcattcttggccggtctaatggcatcggagcttggtgaagacgcaaagcttgctaaacgtgcgggtcttcttcacgacatcgggaaagcaattgaccatgaagtagaaggaagccacgttgagatcggggtagagcttgcgaccaaatataaagagcacccagtcgtgattaacagtattgcatcacaccacggggacgaggagccgacttccattattgctgtactggtagctgcagcagatgcgctttccgctgcaagacctggcgcaagaagtgagacgctcgagaattatattcgaagacttgaaaaactcgaagaaatttctgagtcctacgaaggtgttgaaaaatcatttgccattcaggctggacgcgaagtgcgaattatggtgaagccggattcaattaatgatcttgaggctcatcgactggcgcgagatatccgcaagcgaattgaggacgagctcgattatccaggtcatattaaggtgacagtaatcagagagactcgagccgtagagtatgcaaaataaagtgatgcgctaagcatcactttatttttttgacggcaaggaattttcaagaagaaaggatttacaaaatgagaattttatttatcggagatgttgtcggttcaccgggccgtgacatggtcaaagaatatgtaccaaagctaaaaacaaaatataagcctcactttaccattattaatggtgaaaacgccgcacatggaaaaggcctgacggaaaaaatttatcacagcttaatccagtccggggcagatgcaatcacaatggggaaccacacatgggacaaaaaagaaatatttgattttatagatgacgttccgaacttggttcgcccggcaaactttcctgaaggaacaccggggaaagggatcacatatgtgaaagcaaacggcaaagaactagcagtcattaatttgcagggacgtacgtttttgccgccgcttgatgacccgtttttaaaagcggatgaattgatcgcagaagccgcgaaaagaacaccgtacatttttattgactttcatgccgaagcgacaagtgaaaagctcgcacttggctggtacacggatggacgggcatcggctgtagtaggaactcatacacacgtgcaaacagcggataaccgcattttgccgaagggaacggcatatattactgatgtgggaatgactggcccgtatgacggtatactggggatggacagagagacgattattaagcgattcaaaacgaaccttccagtccggtttactgtcgctgaaggaaaaacaacgctcagcggagttgtcattgacattgacgatcaaacgaaaaaagccgtgaaaattgagcgtattttaatcaacgatgatcacatgttctttgaatagttgaacatatggttattttataaaaatattaaaaagaaaagcaggaatatagcaactccttagtgaatatagtaaaaatggaaggtagcccgctatttttgaaaagcattgtggggatggctttttggatagcaacatctaataatgattgttctaatgaacactcacttatccattgtaaaactaagggggagcagaaatggaaatcttaaaagtttcagcaaaatcgagtccaaattcagtggcaggtgcgcttgcaggcgtgttgagagagcgaggagccgccgagattcaagcgatcggagcgggtgcattaaaccaggctgtaaaagctgtggcgattgccaggggatttgtggcgccaagcggcgttgatttgatttgtattccggcttttacagatattcaaatcgatggggaagaaagaacagcgattaaattaatcgtggagcctcgctaaaaacaaataaagcattctcaacctgtttgcgtaatgcaaacaggttgtttttcatttattgtgatattttctcccgatagtatttttagcacataaatgagcgaatatacaaaatcagaaatgagctaaaacgtttcaaaaaaaatttccgcccatttttcaagacagatacttttgtccttctggaaaagacagtgctgtttacgcttattccatatcatggtacaatccgaatataacaagaatttttcaaggaggattgtacatgcagagtggaaagatgaaagctctaatgaaaaaggacggggcgttcggtgctgtgctgactgaagttcccattcctgagattgataaacatgaagtcctcataaaagtgaaagccgcttccatatgcggcacggatgtccacatttataattgggatcaatgggcacgtcagagaatcaaaacaccctatgttttcggccatgagttcagcggcatcgtagaggacgtgggagagaatgtcagcagtgtaaaagtgggagagtatgtgtctgcggaaacacacattgtttgtggtgaatgtgtcccttgcctaacaggaaaatctcatgtgtgtaccaatactgctataatcggagtggacacggcaggctgttttgcggagtatgtaaaagttccagctgataacatttggagaaatcccgctgatatggacccgtcaattgcttccattcaagagcctttaggaaatgcagttcataccgtacttgagagccagcctgcaggaggaacgactgcagtcattggatgcgggccgattggtcttatggctgttgcggttgcaaaagcagcaggagcttctcaggtgatagcgattgataagaatgaatacaggctgaggcttgcaaaacaaatgggagcgacttgtactgtttctattgaaaaagaagacccgctcaaaattgtaagcgctttaacgagtggggaaggagcagatcttgtttgtgagatgtcgggccatccctcagcgattgcccaaggtcttgcgatggctgcgaatggcggaagatttcatattctcagcttgccggaacatccggtgacaattgatttgacgaataaagtggtatttaaagggcttaccatccaaggagtcacaggaagaaaaatgttttcaacatggcgccaagtgtctcagttgatcagttcaaacgtgatcgatcttgcacctgttattacccatcagtttccgttagaggagtttgaaaaaggtttcgaactgatgagaagcgggcagtgcggaaaagtaattttaattccataaagggggataaacatgacgaaggaatttgagtttttaaaagcagagcttgatagtatgaaagaaaaccatacatggcaagacataaaacagcttgaatctatgcagggcccatctgtcacagtgaatcaccaaaaagtcattcagctatcttctaataattacctcggattcacttcacatcctagactcatcaacgccgcacaggaggccgttcagcagtatggagccggcaccggatcagtgagaacgattgccggtacatttacaatgcatcaagagcttgagaaaaagttggcagcctttaaaaaaacggaggcggcacttgtattccaatcaggcttcacaacaaaccaaggcgtactttcaagtattctatcaaaagaggacattgtcatctcagatgaattgaaccatgcctctattattgacggaattcgactgacaaaggcggataaaaaggtgtatcagcacgtcaatatgagtgatttagagcgggtgctgagaaagtcaatgaattatcggatgcgtctgattgtgacagacggcgtattttccatggatggcaacatagctcctctgcctgatattgtagagctcgctgagaaatatgacgcatttgtgatggtggatgacgcccatgcatccggagtacttggcgaaaacggcaggggaacggtgaatcacttcggtcttgacggcagagtgcatattcaggtcggaacattaagcaaggcaatcggagtgctcggcggctacgctgcaggttcaaaggtgctgatcgattatttgcgccataaaggccgtccatttttattcagcacatctcatccgccggcagtcactgcagcttgtatggaagcgattgatgtcttgcttgaagagccggagcatatggagcgcttgtgggagaatactgcctattttaaagcaatgcttgtgaaaatgggtctgactctcacgaagagtgaaacgccgattcttcctattttaattggtgatgaaggtgtggcaaagcaattttcagatcagctcctttctcgcggtgtttttgcccaaagtatcgttttcccgactgtagcaaagggaaaagccagaattcgcacgattataacagcagagcacaccaaggatgaactggatcaggcgcttgatgtcatcgaaaagacggcaaaggagctccagctattgtaacaagaggaagagtttactcttcctcttttgattccttattgattattattctcaatgagtgtacaatgataggttgccagttgtgcagagcttcaataacctttatactgaagggtggaagtttggtttgaaaggagaaaatatgacatgaatgaaaaacaaaaattagagagcggacaagttaatccatcggacaaaaaatccgagaaggattacagcaagtactttgaagctgtttacattccgccttctttaaaagacgcgaaaaaacgaggcaaggaagccgttacttatcataatgactttaaaatttctgaacaatttaaaggattgggagacggaagaaagttctatatccgtacgtacggctgccaaatgaatgaacacgatacagaggttatggcagggatctttagggcgctcggttacgaagcgacaaactctgttgacgatgccaatgtcattttgttaaatacatgtgcaatccgtgaaaatgctgaaaacaaggtgtttggtgagctcgggcacttaaaagcactgaaaaaaaacaatcccgatctgattttaggcgtgtgcggctgtatgtcccaagaggaatcagtcgtgaaccgtattttgaaaaaacatccgtttgtcgatatgattttcggaacgcataacattcatcgcctgccggagcttttgtcagaagcatacctttcaaaagaaatggttgtagaagtttggtctaaggaaggggacgttattgaaaaccttccgaaagtccgaaatggaaaaattaagggctgggtcaatatcatgtacggctgtgacaaattctgtacgtattgcattgtgccttacacacgcggaaaagaaagaagccgccgccctgaggatatcattcaggaagtgagaaggctcgcaagtgaaggctataaggaaattactctgttaggccaaaacgtaaacgcgtatggaaaagactttgaagatatgacgtacggacttggtgatttgatggatgaactgagaaaaatcgatatcccgagaatccgttttacaacgagtcatccgcgcgactttgacgaccgcctcattgaagtgctggcaaaaggcggaaatctgcttgatcacattcatcttccggttcaatcaggaagctcagaagttctcaagctgatggcccgcaaatatgacagagagcgttacatggagctggtgcgaaaaattaaagaagcaatgccaaacgcttctttgacaacggacattatcgtcggatttccaaatgaaacggacgaacagtttgaagaaacgctttctctataccgtgaagtggagtttgacagcgcctatacgttcatttactctccgcgtgaaggcactccggctgctaagatgaaagataatgtaccgatgcgtgtgaaaaaagaacgcctgcagcgtctaaacgcactggtgaatgaaatttctgctaaaaaaatgaaggaatacgaaggcaaggttgtcgaagtattagttgaaggtgaaagcaaaaataaccctgatattcttgcgggctatactgaaaaaagcaagcttgttaatttcaaagggccgaaggaagccatcggcaaaatcgtccgcgtgaaaatccagcaagcgaaaacatggtcgcttgacggagaaatggtaggagaagcaatcgaggtgaaataagatgacgctctactcaaaaaaagacattgtgcagcaggcacgaaaccttgcaaaaatgatctctgaaacagaagaggttgattttttcaaacgggctgaagcgcaaatcaatgagaatgacaaagtgtccacaatcgttaatcagattaaagccctgcaaaagcaggctgtcaatctgaagcattatgaaaagcatgaagcgctcaaacaagtagaagcaaaaattgacgcgctgcaagaagagcttgaagagattcctgttatccaggaattcagagactcgcaaatggaagtaaatgacctactgcagctcgttgcacacaccatttccaaccaagtcacaaatgaaatcatcacatcaaccggaggcgacctgctgaaaggggaaaccggttcaaaggtgaagcattcaaataacagctgttctctctaaacacggtgcctttacaggcccgtgtttttttatgtgtgggttatgaactaaataatctatgtaccaaatgttcaattggtttttctgtgcgcagccgcgtgtaaactttatcgcacttataagtaaagtttctaggctcacctgcatacaatggaacagaaactttgtatttttatattttatttataaaaatgcacactagacaaatgcccagcataagataacacgaagaagaacaaggaggcatgccggaatgtctgaatacagggaaattattacgaaggcagtagtagcgaaaggccgaaaattcacccaatgcaccaacaccatctcgcctgagaaaaaaccgagcagcattttgggtggttggattattaaccacaagtatgacgctgaaaaaattggaaaaacggtagaaattgaagggtattatgatataaacgtatggtactcttacgcggacaacacaaagacagaggttgtcacagaacgggtaaaatatgtagatgtcattaaactcagatacagagacaataattacttagatgatgagcatgaagtgattgccaaagtgcttcagcagccaaactgccttgaagtgaccatttcgccgaatggaaataaaatcgttgtgcaggcagaaagagaatttttggcggaagtggtaggggaaacaaaggtagttgttgaggtcaatcctgactgggaagaggatgacgaggaagattgggaagatgagcttgatgaagagcttgaagacatcaacccggagtttttagtgggagatcctgaagaataaaaaagggactaggggagacagtacccccaagtctcttttttatattgatatatcattcttttatcactttttgtttatgttataatgaaggttggaaaatagaaacgttgatacatagtgagggattaaacaatggccggttatacgcctatgatacagcaatatttaaaaataaaggcagagcaccaggatgcctttttattttttcgcctgggtgatttttatgaaatgttttttgaggacgccaaaaaagcgtcacaagagctggaaattacgttaacgagcagagatggcggtgcggctgaaaaaataccgatgtgcggtgtgccgtatcattctgcttccgcgtatatcgaacagcttattaaaaaaggatacaaagtggcgatctgtgaacagacggaagatccgaaagccgcaaagggcgttgtgaaaagagaagtggttcagctgattacgcccggaactgtaatggacggcaaaggcatccatgaatcggaaaataattttatcgcatctgtttcagcctgctcgaacggatacggacttgcgctgtctgatttaacaacgggagaaaatttggctgttttgattgaacggcttgaagacgtcatatcagaaatttattcagtcggcgcacgggaaatcgtggtttcaggaagcttggatgccgatacagtggcacagctgagagagcggtgcggtgcaacgatctcaattgaagatggagaaacagacgaacacgtaacgatcattgagcacttaaataatgaagatataacaaaaacatttatgcgcttatatacgtatttgaaaagaacccaaaagcgcagccttgatcatcttcagcccgtgcaggtgtatgagcttgaggaagcgatgaaaattgacttgtactcaaagcgtaatctggagctgaccgaaacgattcgttcgaaaaataaaaaaggctcccttttgtggctgctggatgaaacaaaaacggcaatgggaggccggctgcttaaacagtggattgaccggccgcttatcagagtcaatcaaatcgaagagcgccaagaaatggtggaaacattaatgtcccatttctttgaacgggaagatctgcgtgaacgtttaaaagaagtatatgacttagaacgccttgccggacgcgttgcattcggaaatgtcaatgcccgggatttgattcagctgaaggaatcgttaaagcaagttcctggcatcaaacagctggttgcttcactggctcatgacaaggccaaggaacgtgcagagcgcattgacccttgcggggatgtacttgaactgctggaagaagcgctgtacgaaaaccctcctttatcggtaaaagaagggaatctgattaaagatggttataatcaaaagcttgatgaatatcgtgatgcaagcagaaacggaaaagactggattgcccgcctggaacagcaggagcgggaatacacaggcattcgttctttaaaggttggctttaataaagttttcggttattacattgaagtgacaaaagcaaatttgcacttgcttgaggaagggcgttatgagcggaagcagacgttaaccaatgcagagcgctacattacacctgaattaaaagaaaaagaagcgctcattttagaggcggaaaataacatctgtgaactggagtacgagctgtttaccgagctgcgcgagaaggtgaagcagtatattccgcggctgcagcagcttgcaaaacagatgagcgagctggacgcactgcaatgctttgcgacaatcagtgaaaatcgtcactacacgaaaccggagttctctaaagatgaagtcgaagtgattgaaggcagacacccggttgttgaaaaagtcatggacagccaggaatatgtcccgaacaactgtatgatgggcgataacagacaaatgcttctcattacaggtccaaacatgtcagggaaaagcacgtatatgagacaaatcgcgctcatttccattatggcgcaaatcggctgctttgtacccgcgaaaaaagcggtgcttccgattttcgatcaaatttttacgcgaatcggcgctgcagatgatttgatttccggacaaagtacatttatggtagaaatgcttgaagcgaaaaatgcgattgtcaacgcgacgaaaaacagcctcattctgtttgatgaaatcgggcggggaacgtccacttatgacggcatggcgctggcacaggcgattattgaatatgttcacgatcatatcggcgccaagacgctgttcagcacacactatcacgagctgaccgttcttgaggacaagctgccccagctgaaaaacgttcatgttcgcgctgaagaatataacggaacggttgtctttcttcatcaaattaaagaaggtgccgctgataaaagctatggtatccatgtagctcagcttgccgaactgccgggagatctgattgctcgcgctcaagatattttaaaagagcttgagcattcaggaaacaaaccggaagtgccggtgcagaaacctcaggtgaaagaagagccggcacagctgtccttttttgacgaagcggaaaagccggctgaaacaccaaagctttcaaaaaaagaaaagcaagtgatcgatgccttcaaatcacttaatatactggatatgacaccgcttgaagcgatgaatgaaatgtacaagctgcaaaagaaattacattaaaacggggtgatgaatgtggcaaaagtcatccagctgtcagatgagctttcgaataaaatagcggcgggcgaggttgtggaacggcccgcctcagtcgtcaaagaattggtggaaaatgcgatcgacgctgacagcacagtcattgaaatcgatattgaggaagcaggccttgcatccattcgggtcttggataacggcgaaggaatggagaatgaagattgtaagcgtgctttccgccgccacgcaacgagtaaaataaaagatgaaaatgatttattcagggtgagaacgctcggtttcaggggagaagccctgccgagtatcgcgtcagtctctcatctggagattacaacaagcactggtgaaggagctgggacgaagctcgtcctccaaggaggaaacatcatttccgaatcgcgttcctcaagcaggaagggaactgaaattgtcgtttccaacctgttttttaacacaccggcccgtttgaaatatatgaaaaccgttcatacagagcttggaaacattacagatgtggttaaccgtattgctctggcgcatccagaggtatcgatccgcctgcgccatcatgggaaaaacctgcttcaaacgaacggaaacggagatgtgcgccatgtactggcagcgatttacggcacggctgtcgccaaaaaaatgcttccgctgcatgtgagctccttggattttgaagtaaagggatatatcgccctcccagagattacacgggcgtcgagaaactatatgtcgtctgtggtcaatggccgttacattaaaaatttcccgctcgtcaaagcggttcatgaaggctatcatacgcttctgccgatcggacgccatccgattacttttatagaaattacgatggacccgattttagtcgatgtcaacgtgcatccatcgaagcttgaggtccggctcagcaaggaaacagagcttcatgacttaatacgtgacggaattaaagatgtgtttaaacagcagcagctgattcctagtgcccaggtcccgaaaaaatcagcacctgccatcaaaaatgagcagcagtttataacctttgatgaaaagcctccggaaaaaaaagttccggaaaaatcgactgcgccatcttattcaccgatgaagctcagctcagtcgtaaaagagccggttgatgcggaggaaaaattgccccctctccaatttgatgctcctcctatcgttgatcaggaacaaacccttgaggtgtccgatgtttcagcagaacagcctgaaacatttgagcaggaatgccatgaggaacagccgcagccagcgtctgatcgggttccaattatgtacccgattggccagatgcacgggacttatatattggcacaaaacgaaaacggcctatatattatcgaccagcacgccgcccaagaacgtattaaatatgagtacttccgtgaaaaggtgggggaggttgagcctgaggtgcaggagatgattgtaccgctgacgttccactactccacaaatgaggctttgattattgaacagcacaaacaagagctcgaaagcgtcggtgtctttttagagtcattcggctctaacagttacatcgtccgctgccacccagcctggtttccaaagggagaagaagcagagcttatagaagaaatcattcagcaggtgctcgactccaaaaatatagatattaaaaaactccgcgaggaagcggcgattatgatgagctgcaaaggctccatcaaagcaaatcgccacctcagaaacgacgaaatcaaagcgcttctggacgacctccgaagcacatcagacccatttacatgcccgcacggccgcccgatcatcattcaccactcgacatatgagatggaaaagatgttcaaacgcgtgatgtagcgggggtggtaggcattgatccattctctgaatggatcaatgctttttttgtactccttcgagtgtcagattataagaaacggttgtaaacgtgtgagcagtgttaaagcattatacttcatggtccctccgtataacgaaatttccatttacaggcaattagaattaatgtatattttgggtgagggggtggaaacacatggcatgtggtccgaagatcattatctttttggatgaacttgatgatccgaatgtaagaatcattttagaatgcagaatttaaattacaacattgtgttttgctccctgttcgtgtgaacagggagttttttcgtttatataactggtgatgtccaaatataaggtgttatgaattctccatatctgccatcggcattttaagctgcttctctattaggctggtcatcaaaagcaagttcagtgaaagccatcactgctgatatcacaacaagcaagatatctggaatataaatagactgcataaagtaatctgcaaaacagatcgttataagattgctgataaaatacagtataaaagcaaaaagtgcagtctttttcaatgaaagtgattttgccaaaatgatagagataatctttgtgagtgggtctatgattaaacctacagcaaagcaggctaaaataaataaagctaatgtttgattggaagcgtatgtgatgcccagtatggagaataagcctttcatcccgaagaaaaagccgccgaagatgactgcaagcgcaatggccgcgataaaagtgatagatacaattccgattaattttgatctgaggttaaaatctttagagtgctcgttctgttctttatggttcaagtatgacactcccttcacctgcttactcatacaaacagcacccttgaatcagcccaaaatatctataagtctgttttctgacgaaaatagtatagcatattttaacaaaaccaaaaaaggccctttccactggggaagggcctttttcatcatgttaactcctgagattcgccgaagctttctctttttttggccaaataaaatagctggctgtaatgagaaagtcaattcctataatgacagtccacagtttaagaatgccgctcaacgcctcggttcgggaagagtcattgataaaatagatcatccctgccaatagtcccgcaccaattaagtaggccagcacatgtcttagccagcctttcgcaccgtgtttggcatgatccattccaaaacgtttcagcggttttgcgcctttttttgtcacataatattgaaatttttcatctgcccattgaatcatttgtttcccataagcgatcgatataccgatgtaaacagctgcaatcccatgggctgcggtcgctgaggctccgcggtaaaggtccacaccagttgccgctaacaagatcaaatcgataactggagttaaggcaaggaatagcagtcctaatgtatgtcgtttgaatacgtagcgtacagcaagccccaaaacaatgacaacccaaaacgcaatttcacagaaaacaatcatccatgcgataccgttcaatccattcccctcttttcaatacagttgtattatttaaataatatgttaccatctttgtttttgtaacacaactgtattataaaaattgccctctcatttttttcttgttacaataaagctatgccaaaacaaattgaccatgagaaaagaagaaaacaaattgcagaagcaacgtggcgcgtcattttagaacgagggatggagggagcatcagccagaaatattgcaaaggaagcaggattgtcattaggtgcgctgcgccattatttctctacacaggatgaattgcttgcttttgcaatgaaacttgtccaagaaaaggtgacggaccgaattaaggacattgcagtgagggatttgctccctaaggaaaaagtgttgcaaattttgcttgaaatggtcccgacgaatgaagaaacgattagagagatggaggtttggtttgcttttactgcttacgccagacataaaaaggatatgtttgatgcgaatcatgacgggattttcagcggcatgcggaatctgattgcctatttagatgaatccgatttactgaagccgaatgctgataaagacattgaagctgagagactttacgcgcttgttgacggcttggctttacatgccatgcttgaccctgtgcgagtgaataaagaccgaatcaagcgggtcattatgcagcatgtagagtcaatttgcgtggaagatacacgtgagacacaaaaacgtcatccttaaggcactagtgcgaaaagcgattcttgttgggcatgcgtccaaaagagtcgcttttttatattcaaagaacaaggatctctgaaaaaaatggaaaacgatcatgctgtttggtaaagtggaatgaaagacggactgaggagtgaacactggtccatcgtttaagaactttacatgatagggatggtataaatgaatcttacttacaaagtgcatccaattaaaacaaggtatcagggctggacgaattattgctatatcattgaagatattgtaagcagatctgcaattgttgttgatccctcatgggaattgagtaagataaccactacactttctgaactcgaagcggaattaaaggcagtcgcattgacacactctcattatgatcatgtaaatctggtagacccgctgacgaagatgtttaacgctcaagtttatatgtcaaaaaaagaaattgattattatcaattccgatgcagaaatttaattagcctagatgatcatcagacaatcagcataggaaacacaagagcacaatgtcttctcacaccggggcatacagccggcggaatgtgttatttgttttctgagagtatttttaccggagatacggtgtttacagaagggtgcggcatatgtgaggatgatggcagctctgcggaagagatgtttgatagtattcaaagaataaagtcggaggtttcacctcatgtacgggtgtatcctggtcactcatttggcaaatcgcccggtcattcgataaaggatctttatcagcataatatttactttcaaattgataaaaaagaatattttgtgaaatttcgcactcgtaaaaaccaaaaaggtatttttgattttaaataatccttctgaatctattatcctatttttcttcgaatatctaaatgatttttattttcaaaaatgattacatagaaggtgttatttattttgaaaactcatttgaaagaaaatgaagcgcattatcatgatatggcgccctatacgtgatctgggtcttttttcttatgttctgttatatctcctgatcctttattcctcaatggaaaaaagcagaaaaacaatcgagcaaactgtaggaaaaattaacttgacggataatatttacagaggttaccatcaacatgaacatgctactatttatccggtcatcactattataaaatcatacagaagtgaaatacatctactaatcggaagggtggctttgagagaatgatcacatatgtttttccaggtcagggttcacaaaaacagggaatgggcagcggcctattcgatgaatttaaagaactgacggatcaggcagatgagatcttaggatattctatcaaacgtctttgcctggaaaatccttattccaatttaaacaaaacgcaatttactcagccggcattatatgtggtaaacgcactaagctatctgaaaaaaatcaaggatgaagaagttaaacctgactttgtcgccgggcacagcttgggtgaatacaatgcgttatttgcagctgaagcctttgattttgagacaggtttacagcttgtcagaaaaagaggcgagctgatgagtctgataagcaacggcggtatggcagctgttatgggactaaatgaagagcaggttgcaaaggctctgaaagaatatcatttacatgatgttgatatcgctaatgtgaatgccccatatcaaattgtaatttcaggaaaaaaagatgagattgaaaaagccgcatctctttttgaaacgatgactgaagttacaatggtactccccttaaacgtaagcggcgcgtttcattccagatacatgaataaggcaaaagaagaatttgaggagttccttcatgccttttatttttcgcctccgtctatcccagttatttctaatgtgtatgccaaaccgtatacatacgaattcatgaaacagacgctggctgatcaaattaatcattcagtgaaatggactgacagtataagctacttaatgaaaaaaggccatatggagtttgaggaggtagggcctggaaatgttttaactgggttaattcatcgcataaagaaagatgcggaagcaatgcccagctaaagcatttgcccctatggccgtgcacctcatcaatcaggtctaaacacagatttcctttcatttaaggtataaagttttaaagattcaatcgttcgattgacactgtttctaattgaataactttatatactgttacataaagaggctgataaattaagttagacatttgaactatgtcagccggtctgtcaaaccatcgctcccacatctagatggtccattttttaaccgcacccaccaatcatagagtcgatgttctttgctgatcctgttatcatgttacatcaattttgagatatcaacatacatctacgatcacgtcataaatgaaccgcatccagagcaccaatagcaatccttccaagttgaatctcctttactttttcacatatgtcttttccgtttattaatttcatttcaatcgctgctatgtgctttaacaacatgcatggaaatgagaaatccaatagccgtcataaatataaaaaaagaaggttatacacatgaatgaaccgcttgtttttatgttttccgggcaaggttcccaatactatcacatggggaaagaactatttaaggaaaataccgtgtttcgtcaatcaatgcttgaaatggatgccattgcagcacggcgaatcggcacatccattgttgaagaaatctaccatccaggtaaacgtgtgtcagatccgtttgacagtattcttttttcccaccccgccatttttatgattgagtattccttatataaggttttggaagacaggggaatttatcctgattacgtattgggatcaagtctgggagaattcgcagcagcggcagtttctggtgtgtcagacgcagaggatatactggattgcatacttgaacaggctattatcatccaaaattcctgcgataaaggaaaaatgatggccattctggacaaaccgcaattgctgaatgattatccgcaactgtttggaaatagtgaactcatttctatcaattatgattcgcacttcgtcatttctggtgaagaagatcatataaggaagattatggaggatttaaaggagaagcagattctttgccagctgcttcctgtgtcctatgcctttcattcttcgcttattgatccggcagagagtgcctatgcagaatttttaagatcaaaatcttttcaaaaaccgtcaataccgattgtatcgagcttaacgggaagctgccttcacgtaatggacgagaatttcttttggaatgcggtcagaaagccaatgatgtttcgtgaagcgattcgatatttggaaagccagcatacatgcaagtttatcgatttagggccatccggcaccttagctgcttttgtgaaacagctgattccgggtgatgcagctgaccgttgctgctcaatcataacaccatttcatcaggagctgaaaaatctgaatacggttgagtattaccgtacaccagaaaggaagtttacaagatgattacatatgtctttccagggcaaggctcccagcaaaaggggatgggacaagggctatttgaacagtatcagcatttgacagatcaagcagatcaaatattgggctattcaatagagaagctatgtaccgaaaaatcatatctggatgtaaatcatactgaatacacgcagccggctttgtatgttgttaatgcactcaattacttgaagagagtggaggagaccggcagaaaacctgattttgcggcaggacatagcttaggagaatacaatgcgctgatggcagccggtgcctttgattttgaaaccggattaaggctcgtcaaaaaaagaggagaattgatgggacgaattacagggggcggaatggctgctgtgatcggcctgagtaaggaacaagttacagccgttttagaagagcaccgtcttcatgacattgatgtggcaaatgaaaatacgccccggcaaattgtgatttctggcccgaaaaaagagattgaaaaagctcgggctgtttttgaaagcaccaaggatgtaaagctgtttcatccattaaatgtgagcggagcttttcattccagatatatgaatgaagccaaacaggtatttaagcaatatattgactcattccagtttgcacctttggcgatcccggttatctccaatgtctacgcagagccataccatcaagacagattaaaagatacattatctgaacagatggacaacacagtgaaatggacggacagcattcgtttcctgatgggaagaggagaaatggagtttgaagagattgggcctggaactgttttaaccggtctcattcatcggattaaaaatgaagctgaaccattgacatatataccgaaaaagaaccccgcgatcagtgcgcatctaaaggagaaacgcaatgttcaagctgggattacggcagaatctttaggaagtgctgaatttaaacaagattatcatcttacatatgcttatcttgcaggaggaatgtaccgcggcattgcttcgaaagaaatggtagtaaagctgtcaagagcgggaatgatggggttctttggcacaggaggtctgagcctgaaagaggttgaagatgcgatccatgctatacaaggtgaattagggaaaggacaagcctatggcatcaatctggtccacaatatgaaacatactgaatcagaagaaaaaatgatcgatcttttattgaggaatcaagtgagcattgtggaggcttcagcatttctaagtgtcactcctgcattagtaaggtaccgcgcaaaaggagtgaaacgaaatcaaaatggtgacgttatatgctcaaatcgtctcatagcaaaaatatcacggccggaagttgcagaatcatttctgagtcctgcgcctgagaatatgctgcaaaagcttttaggagaaaataaaatcactatgaacgaagctgagttgttgcggtgcattccgatggctgacgatatttgtgtagaagctgattcaggcggtcatacagatggcggtgtggcatacagcctgatgccggcgatgacatctttaagagatgaaataatgaaaaaatatcaatttcggaaaaaaataagagttggtgcagctggagggattggaacacctgaggcagcgatggcggcttttatgctaggggctgattttattctaacaggctcaatcaatcaatgtacggttgaggcggcaacaagtgataaagtaaaggatttgcttcagcagatgaatgtacaagatacagcctatgcgcctgcaggtgatatgtttgaatcgggcagtaaagtgcaggtgctaaagaaaggcgtgttctttcccgcacgggcaaacaagttatatgaactgtaccagcggtatgggtctatacgtgagctggatgcaaagatgctggcccagcttgaggagaaatactttaaacgcagtatagaagacatatataaagatattgcattgcattatcccgcggcagacattgagaaggctgaacaaaacccgaagcataaaatggctttgattttccgatggtacttcagatacagctcaaaattggcaatcagcggaagcgaacattcgaaggtcgattatcaaattcactgcggtcccgcgctgggagcctttaatcaatgggttaaaggatcgcaattagaaaattggcgaaaccgccatgtggatgaaattgggaaaaaaataatgacagaaacggcagtattgcttcatgaacggatgcaatcgatgtatcagccgtcgcatgaaacagacaacataaaaatgaaagtttgaatattatgaaaaaatacctataaaaatcattaaaataatccctcgaaggagagagcgtattatggataaacagagaatctttgaagtactaatcaccaatatttgcgaggtgcttcctgaattagacggacacagatttgagcctgaagatcagctagttgagctaggagctgactctgtagacagagctgaaattatcacgatggtgctagaggatttatcgctaaaaattcctcgcattgagctatccggggtgaaaaacatcggtgaattagctgaggtgctttatgacaaagtgcaatctgcctgaggtggtggtgaccggtgtaggcgttacggcctccatcggtcaagggaaagaggactttgcttcctcgctgctgtccggcagacatgcctttgatgtcatgaagcgttcaggcagacaaaaagacagccggtttatcggagccgaaattgcgtcattgtcttatcctgaccgactctccaaaaaaatgttgcgaaaagcatcattctccagccgcgctgcattggtaactctcacagaggcttgggaggaggctgaattggacgatgcagattcctcacgtatcgggctggttgttggcgggtcaaattttcaacagagagaaaactttgaagtttatgaaaggtatcaagaccgctccggttttatttctccggcgtatggcctgtctttcatggacagcgatctttgcgggatatgtacagatcagtttggcatcacgggattagcatatacggtgggaggagcctcggccagcggccagttagcagtcattcatgcgattcagcaagtcctgtcaggcgaagttgatacttgcattgcacttggtgctttaatggatctttcttatatggaatgcgaggcgctaagggctttaggcgctatggggacggacaaatatgctgatgaacctgaaaaagcgtgccgtcccttcgatcaaaacagagacgggtttatctatggagaatcgtgcggtgcattggtaatagaacgaaaggagacggctttacgaagaggtcttaaaccttatgcagcattgtctggctggtcaatcaaactggacggaaaccggaatcctgatccttcattagaaggagagattcatgtcatccagcaggcactggagcgtgccaggcttttaccagaagatattgattatattaatcctcatggaacaggctcttttattggagatgaaatagaattaaaggcgctccgtgcatgccggctttcccatgcttatatcaatgcaacaaaatcgataaccggacacgggcttagtgcggcgggcatcgtagagattatttctgttttgctgcaaatgaaaaaatctgccctgcatccgagcaggaatttggatcatccaatcgatgattcctttcattgggtaaatgagaaatcgatttcataccgcatcaaaaatgcgctgagtttaagcatggggtttggcggaatgaacaccgcggtttgtatacaaaacattgagaaatgtggaggcgaatcataaatggtttcagccggaatagaagcgatgaatgtctttggcggaacggcataccttgatgtcatggagctggccaaatacagacacttagatactgcgagatttgaaaacttattaatgaaagaaaaagcggtagcactgccttatgaagatcccgtgaccttcggagtcaatgcagctaagccgattattgatgctttatctgaagcagagaaggaccggattgaattgctgatcacttgctctgaatccgggatcgactttgggaaatcgttaagtacatatatccatgaatatttaggtctcaaccgcaactgccgtttgtttgaggttaaacaggcgtgttattcagggacagcgggatttcagatggcggtgaattttatattatcccaaacttctccgggtgccaaagcactggttatcgccagtgatatttcacgttttttaatcgctgagggcggagacgctttaagcgaagattggtcttatgcggaaccgagcgccggagcgggagcggtggccgttttagttggcgaaaatcccgaggtgtttcaaatagatcccggagcaaatggttattacggctatgaagtgatggacacgtgccgccccattcccgacagtgaagcgggagattctgatctgtctttaatgtcatatttggattgctgcgaacagacctttctggaatatcaaaagcgtgtaccgggtgccaattatcaggacacgtttcaatatcttgcttaccatacgccctttggcgggatggtgaaaggtgcgcaccggacaatgatgcgtaaggtggcgaaggtgaaaacatccgggattgagacggattttttaactcgggtaaaaccaggtttaaactactgtcaacgagttggaaatattatgggggcagccttgtttctggcattggccagcacgatagaccaagggagatttgatacgcctaaacgaattggctgtttttcctacggatccggctgctgttctgaattttacagcggaattacaactccgcaaggccaggagcgtcagcgaacatttggtattgagaagcatttggatcgccggtatcagctctccatggaagagtatgagctattgtttaaggggagcgggatggtgcggtttgggacgcgcaatgtaaagctggactttgagatgataccgggcatcatgcagtccactcaagagaagccgcgcttgtttttagaagaaatttctgagtttcatcggaagtacaggtggatctcgtgacctatcaaacgataaaggtccgctttcaagcgtcggtttgctatattacctttcaccgtcctgaagcgaataatacgattaatgatacgctgatagaagaatgcttgcaagtgttaaaccaatgtgaaacatcaacggtgacggttgtcgttttagaggggcttcccgaggtgttttgtttcggagcggattttcaagaaatctatcaggaaatgaaaaggggcagaaaacaggcaagctcccaagagcctctctatgatttgtggatgaaattgcagaccggcccttatgtcacgatttcgcatgtcaggggaaaagtgaatgccggcggtcttggatttgtatctgccacagatattgccattgctgatcagacggcgtcattcagtctctctgagctgctattcggcctgtaccctgcttgtgttttaccgtttctgatccgccgtatcggccggcagaaagcgcattatatgacgcttatgacaaagccgatttccgttcaggaagccagtgaatgggggttaatagatgcttttgatgctgaaagtgacgtgctgctgagaaagcatttattgcgtttgcggaggctgaataaaaaaggaatcgcacattataaacagtttgtgagctcacttgatcatcaagtcagtcgtgcgaaagccaccgctttaactgcaaatcaagacatgttttctgatcctcaaaaccaaatgggaatcatcaggtatgttgaaacaggacaattcccatgggaggatcagtaaccgtttaaaaatgacaatcagaaccgttaggaggacatcatgacgcattctgttgtagagcttatcgaaattgaatccgccattattcaggtaaagatgcaagatcgcactcataaaaacgcgttttcacaagaacttacagacggtttaattcaagcgtttgaatacatacggcagaaccccaaatacaaagcggtcattttgacaggatatgataattattttgcttcaggaggaacgcaagaaggactgcttcgaattcaacagggattgaccaagttcactgatgacaatctttattctctggcgctggattgtgagattccagttattgcggcaatgcagggccatggaattggaggcggctttgtcatggggctctttgctgacatagtcattctgagcagagaaagcgtgtatacggctaattttatgaaatacggatttacgcctggaatgggcgctacctttatcgttcctaaaaaactgggtttcagcctgtcccaggaaatattattgaatgcgggcagctaccgcggagctgatcttgaaaaaagaggggttccttttaaggtgctgccccgtgcagaagtgttagattatgcagtggagctggcgcaagaactggcggaaaagccgagaaactcactggttacactgaaagatcatttggttgccccgcttcgcgatcagctgccgcgcgtcattgaacaggaattgatgatgcatgagaaaacatttcatcatgaagaagtcaaaagtagaatcaaaggtttatatggtaattaactgaaaatatataaaattttgcaggtgaaatggaggcagcgtgatgagaaataatgataatatccgcattttagctaatccttctgtcagtcatggtgagcctttacatatatctgaaaagcagccggcaacaatacctgaagttttatacagaacggcggcggagcttggggatacaaagggaatcatttatttgcagccggatggaactgaagtttaccaatcatacagacgattatgggatgatggactgcgcattgcaaaagggcttcgccaatcaggcctgaaagcaaaacaaaacgtgattttgcagcttggtgacaattcacagcttctccctgcgttctgggggtgtgtgttaacaggggttgttccggctccattagccgttccgccaacgtatgctgaatcgagcagcggcactcaaaagctgaaagacgcatggacgcttcttgataagccagcggtgattacggaccgggggatgcatcaggaaatgctcgattgggcaaaagaacaagggcttgaagggttcagggcaattattgtagaggatctgctcagcgctgaagcggacacagattggcatcaatccagtcctgaagacttagcgcttttattgctgacttcaggcagtacgggaacgcccaaagcagttatgcttaatcatcgtaacattatgagcatggtgaaagggattattcaaatgcaaggcttcaccagagaggatattacgtttaactggatgccgtttgaccatgtcggagggatcggaatgctgcatttgcgggatgtttatcttggctgtcaggaaattaacgtctcaagcgaaacgatcttaatggagccgttgaaatggctggattggattgatcattaccgagcttctgttacgtgggcgccgaattttgcgtttggtctggttactgattttgcagaagaaataaaagataggaaatgggatctgtcttcaatgcgatacatgctcaatggcggtgaagcaatggtagccaaggtagggcgcagaatacttgagcttttagaaccacatggactgcctgctgacgccatccgacctgcctggggaatgtccgaaacttcatcgggcgttattttttctcatgaatttacccgggctggaacaagtgatgatgatcattttgttgaaataggctctccaatccccggcttctctatgagaattgtgaatgaccataatgaattggttgaagagggtgagatcggccgttttcaagtctcgggtctttctgttactagcggttattaccagcggcctgatttgaatgagagtgtgtttacagaagacggctggtttgaaaccggagatcttggctttttgcgaaacgggcgcttaaccataacaggccgtacgaaagatgcaattatcattaacggcattaattattacagtcatgcaattgagtctgcagttgaagaattatctgaaattgaaacttcttatactgctgcttgcgctgtccgtctgggccagaattcaacagatcagctggctatcttctttgttacttccgcaaaattaaatgatgagcagatgtctcagcttcttagaaacatacaatcccatgtctcacaggtgatcggagtcaccccggaatatttgctgcctgtacaaaaagaagagattccaaaaacggctatcggaaagatccagcgcacccagctaaaaacttcatttgaaaatggagagttcgaccacttgctacataaacccaatcggatgaacgatgcggtccaggatgaggagatacagcaagcagaccatgtgaaaagagtaagggaagaaatacagaagcatctgctcacctgtttgactgaggagctgcatgtttcccgcgattgggtggagccaaatgcaaatatccaaagtcttggtgtgaattctatcaagatgatgaagctcattcgatcgatcgagaaaaactaccatatcaaactaacagccagagagatacatcaatatcctacaattgaacgcttagccagctatctatcagaacatgatgacctcagcagtttgtctgctgacaaaaagggcacggacacatataaaaccgaaccggaaaggagtcaggcaacttttcagcctctctctgaggttcaaaaaggattatggacattgcaaaaaatgtcacccgaaaaaagtgcatatcacgtacctctctgttttaaattttcgtcagggcttcaccatgaaacattccagcaggcttttggccttgtattgaatcagtacccaatcttaaagcacgtcatccaagagaaagatggagtgccatttcttaaaaatgagccggcactttcaattgaaatcaagacagaaaatatctcaagtttgaaagagtctgatattcctgcttttcttagaaagaaagtaaaggaaccgtatgtaaaggaaaacagcccgttagtgcgtgtcatgagcttttccagatctgaacaagagcattttttattagttgtcattcaccatttgatttttgacggagtttcgtctgtcacatttatacgcagtctgtttgatacctatcagcttcttttaaaaggacagcagccggaaaaagctgtttctcctgccatttatcatgattttgcggcatgggagaaaaacatgcttgccggcaaagacggtgtgaagcaccgtacatactggcagaaacagctatcgggaactttgccgaatcttcagctgcctaatgtcagcgcaagttcagtcgattctcagtttagagaggatacatacagcaggcggctgtccagcggcttcatgaatcaggtcagaacgtttgcgaaagagcattctgtaaatgtcacgacggtattcttaagctgctatatgatgctgcttggccgttacaccggccaaaaggaacagatcgtcggcatgccggccatggtgaggccggaagaaagatttgatgatgccattggacattttctcaatatgctcccgattcggagtgagctgaacccggcagacactttttctagctttatttcaaaattgcaattaacgatattagatgggcttgatcatgcagcatatccttttccaaaaatggtgagggatctgaatattcctcgcagtcaagcaggttcaccggtatttcaaaccgcttttttctatcagaattttcttcaatccggaagctatcaaagcttgctgagccgctatgctgacttcttttctgtcgatttcgttgagtatattcaccaagagggcgaatacgaattagtatttgaactgtgggaaacagaagaaaaaatggagctgaacatcaagtacaatactgggctgtttgatgcggcttctatatccgccatgttcgaccattttgtttatgtaacagagcaggcgatgttgaatccatctcagcctttaaaagagtattctttattacctgaggcagagaagcagatgattctcaaaacatggaacgccacaggaaaaacgtatccatatataacttttcatgagttgtttgagcagcaggcgaaaaagacgcctgatagagcggctgtcagctatgaaggtcaaacattgacgtatcgggagcttgatgagaaaagcacacagctggccatttatttgcaggcgcatggagtgggtcctgaccgtctggcggggatctatgtggatcgatcgctggacatgctagtgggtttattagcgatcctcaaggctgggggagcgtatgtgccgctagacccgtcctatccggctgaacgattagaatacatgcttgaggacagtgaagttttcattacactgacgacatcggaattagtaaatacgttgagttggaacggtgtcacaacagctcttttagatcaagattgggatgaaattgctcaaacagcctctgatcgaaaagtgcttacacgcactgtcacgccggagaacttggcatatgtcatttatacatccggcagcacaggaaagccaaaaggtgtcatgataccgcataaagctttgacaaactttctcgtttcgatgggggaaacaccaggtcttacggcagaggataaaatgcttgctgtcacaacctactgttttgatattgcagctctggaattatttttgcctttaataaagggcgcacactgctatatttgtcaaacggagcatacaaaagacgttgaaaaactgaaacgggacatccgcgcgatcaaaccgacagtgatgcaggcaacccccgctacgtggaagatgctcttttattcaggctgggaaaatgaagagagcgtgaaaattttatgcggtggcgaagcatttcctgagacattaaaacgatatttcttagatacgggcagtgaagcctggaatatgttcgggccaaccgaaacaactatctggtcagcggttcagcgcattagcgatgaatgctctcatgccacgataggaaggccaatcgccaatacacaaatctatattacggattctcagctcgcgccagtgccggcaggtgtcccgggtgagctgtgcattgcaggagacggtgtggcgaagggctactacaaaaaggaagaattaacggattcgagattcattgacaacccttttgagcctgggtctaagctttatagaacgggagacatggcccgctggcttccgggagggcgaattgaatatataggccgcatcgataatcaagtaaaaatccgcggattccgtattgaacttggtgatattgaaagcaggcttagtgagcatcccggcattctggaatgcgttgtggtcgcagatatggataacctagctgcctattatacagctaaacatgcaaatgcttctctcacagcgagagagctgcgtcattttgtgaaaaacgctttgcctgcctatatggtgccttcttattttattcagcttgatcatatgccgttaactccgaacggaaagatagatagaaacagccttaagaatatcgatttatcaggggagcagctaaagcaaaggcagacctctcctaagaacattcaggatactgtttttaccatttggcaggaagtgctgaaaacgagtgacattgaatgggatgacggatttttcgatgtgggcggggattcgcttctcgcggtcactgtggctgatcgcatcaaacatgaactatcctgtgagttttctgtcacagacctgtttgagtattcaaccattaaaaatatcagccagtacatcactgaacagcgaatgggcgatgcaagtgaccatatgccgacagacccggcagctcatatagaagatcagtctaccgagatgagtgatctcccagactattatgacgatagtgtagcgattattggcatatcgtgtgaatttccaggggcaaaaaatcatgatgaattttgggagaacctcagagacggcaaggaaagcatagcgtttttcaataaagaagagcttcagcgctttggcatttcaaaggagatagcggagaatgccgactatgtcccggctaaagcttcaattgaggggaaagacagatttgatccaagcttctttcaaatctctcctaaagacgctgaatttatggaccctcagcttcggatgctgctgactcattcatggaaagcaatagaagatgccggttatgctgcgagacagattccgcaaaccagtgtttttatgtcggcaagcaataattcttatcgcgcgctgctgccgtcagatacaacagagagcctagagacgccggacggctatgtttcgtgggtgcttgcacagagtgggacgatcccgacaatgatttctcataagctcgggctgagagggccaagctatttcgttcatgccaactgctcatcatctctgattggattgcattctgcctataaaagcctcctgtcgggtgaatctgattatgctttagttggcggtgcaacgctgcataccgagtcaaatatcggatatgtgcatcagcctgggctgaacttttcgagtgatggacatattaaagcttttgacgcttcagctgacggaatgataggcggtgagggcgttgctgttgtattgctgaaaaaagcagctgatgctgtaaaggacggggatcatatctatgccttgctgagaggcattggtgtaaataacgacggcgctgacaaagtcggcttttatgctccaagcgttaaaggccaggctgacgtggtccaacaggtcatgaatcaaacgaagatacagcctgaatccatctgctatgtagaagcacacgggaccggaacgaagctgggggacccgatcgagctggcggctttaacaaacgtttacaggcaatatacaaataaaacgcaattttgcggcattgggtcggtgaaaaccaatatcggacatttagatacagccgccggtcttgcgggctgcattaaggttgtgatgagtctttatcatcaagagcttgcaccgagtatcaattataaggagccgaatccaaatacagacttagccagctctcctttttacgtcgtcgatcaaaagaaaacgttaagccgtgagatcaaaacgcacagggctgcacttagctcgttcgggcttggcgggacaaatacccatgccatttttgaacaattcaaaagggattcagataagggaaagatagacggaacctgcatcgtcccgatctcggcgaaaaataaagagaggctgcaagagtatgcagaagacattctggcctatttagaaagaagagggcttgagaacagccagctgcctgattttgcgtatacccttcaggtggggcgcgaagcgatggagcatcgcgttgtctttattgccgatcatgtaaatgagttaaaacagaggctcacagattttatcaatggtaaaacagcgattgaaggctgttttcaaggaagtaagcacaatgcaagagaggtttcatggctgacggaggatgaggacagcgctgaactcatacgtaagtggatggccaaaggaaaagtaaacaagcttgcagaaatgtggagcaagggagcgaatatagattggatgcagctttacaagggtgagcgcccaaacagaatgagtctgccgacttatccatttgcaaaggaacgatactggccgtcgcaggatgaccgcaaaccggtggcgcagatatccggaaatcagacagggatcggctctattcatccattgcttcatcagaatacatctgatttttctgaacagaaattcagttcggttttcactggtgacgaatttttcctgagagaccatgtggtaagaggaaagcctgtgcttcctggtgttgcgtaccttgaaatggcgtacgcggctataaaccaggcggcaggaagtgaaattggccaagatgtcagaatcagattgaatcatacagtctgggttcagcctgttgtggttgacagacattcagctcaagtggatatcagtctcttccctgaagaagatggaaaaatcacctttgacatttacagtacacaggaagacggggacgaccctgttattcatagtcaaggcagtgcggagctggcatctgccgccgaaacgccagtcgcagacctcactgaaatgtcacgccgctgcggcaaaggaaagatgtcgcctgatcaattttacgaagaaggcagaagcagaggaatgttccatggtccggcctttcaaggaattaagaatgtgaatataggaaacagagaggttttggcgcagctgcagcttccggaaatcgtttctggaacgaatgaacagtttgtgctgcacccaagtatcatggactccgccttgcagacagcaacaatatgcatcatgcaggaattgacggatcaaaagctgattttgccatttgcgcttgaggagcttgaggtgatcaaagggtgttcttcttctatgtgggcttatgctcgcttaagtgacagcgatcactccggaggggttgttcagaaagcggatatcgatgtcattgacgagagtggaagcgtatgtgtcaggatcaaaggattctcaacgagagtattagaaggggaggttcatacttcaaagccttcaacacggtacgaacgcttaatgcttgaaccggtgtgggaaaaacagaatgaagaacgagaggacgaagatccttcgtacacggagcatatcattgttctcttcgaaactgaacgaagtgtcacagacagcattgcctcccacatgaaagatgtccgtgtgattactctaaacgaagctgaaggacatattgctgaacgttatcaatgttacatgcagaacatttttgaactcctgcaaagcaaggtccgtgaactttctgcaggccgtatcatcattcaagcgattgttccgctggaaaaagagaagcaattgtttgccggcgtttccggtctgtttaaaacagcagaaatagagttcagcaaactgactgctcaggtcatcgaaattgagaaacctgaagagatgatagaccttcacctcaagctgaaagacgacagccagagaccatttgacaaacagattcgatatgaggctggacaccgttttgtgaaaggctggagggaaatggtgcttccttcagctgatatgcttcacatgccgtggagagacgaaggcgtttatctaatcacaggcggagcaggaagcttaggccttctgtttgcaaaggaaattgccaatcgaactggccggtctactattgtgctgacgggacgatctgttttaagtgaggataaggaaaacgagctggaggctcttcgaagcatcggagcggaggttgtctatcgggaggctgatgtaagtgatcagcatgcggttcgtcatcttttggaggaaatcaaagaaagatatggcactctcaatggaattattcacggtgcaggcagcattaaagatcgcttcatcattcataaaacgaatgaagagtttcaagaagtgttgcagccaaaagtgagcgggttgttacatgtagacgaatgcagcaaggatttcccattggactttttcattttcttctcttctctttcgggatgtttaggaaacgctggacaagccgattatgcggcagccaattcgtttatggatgcatttgctgaataccgccgttctcttgcggcatcaaaaaagagattcggctccaccatttccttcaattggccgttatgggaagaaggcggtatgcaagtcggcgctgaagatgaaaagagaatgctgaaaacgacgggaatggtcccgatgccgacagatagtggcttgaaagcattttatcaagggatagtatctgataagccgcaagtttttgtgatggaaggacagcttcagaaaatgaagcaaaaactgctttccgcaggatcgaaagccaagcggaacgatcagagaaaggcggatcaggatcaaggacaaactagaaaattggaagcagccttaatccaaatgattggcgcaattttgaaagtaaacactgacgatatcgatgtcaacacagagctgagtgagtacggattcgactcagttacattcactgtctttacaaacaagatcaacgaaaaatttcagttggagctaacaccgaccattttctttgaatatggtagcgtccaaagcctggctgaatatgtagttgctgcgtatcagggcgaatggaatcaagatgctactgctaaaggcaaagatgaaagaacaaacttagtgcacagtttaagcagcctggaggcatcattaagcaacatggtcagtgcaattttaaaagtaaatagtgaagatattgatgtcaatacagagctgagtgaatacggatttgattccgttacatttacggtctttacaaacaagattaacgaagaatttcagttggagctaacgccgaccattttctttgaatatggaagtatccaaagcctggctgagtatttgactgctgaacatgaggacaccctggttcaggagcgcgaaaaaccagaggggcaggaagagttacagacaaaatcccctgaagcgccgaaaatcacatcacgtagaaagcgccgctttacacagcctgttattgcaaaagcagaaagaaacaaaaagcaggctgccgattttgagccggttgcaatagtcggcatcagcggccgattccctggcgctatggatatagatgaattttgggaaaacctagaagaagggaaagacagcatcacagaagttccaaaagatcgatgggattggcgggagcattatggaaacccagacactgacgtcaataaaaccgacatcaaatggggcggatttattgacggtgtcgctgagtttgatccgttgttttttggtatttcgccgcgagaagctgattatgtagaccctcagcagcgcttgttaatgacatacgtgtggaaggcactggaagatgcgggttgctcgccgcaaagcctttcgggtacagggaccggtatctttatcggtacgggaaacaccggttataaagatctattccatagagcgaatcttccaattgaaggccatgctgctacaggtcatatgattccttcggtaggcccgaatagaatgagttattttttaaatattcatggtccgagcgaaccagtagagacggcctgttccagttctcttgtagccattcaccgtgctgtgactgcgatgcaaaacggtgattgtgagatggcgatcgctggaggcgtgaatacgatcttaaccgaggaggcgcatattagctacagcaaggcgggtatgctcagcaaagacggcaggtgtaaaaccttctccgccgatgcgaatggctatgccagaggcgaaggggtcggaatggtcatgttgaaaaagctggaagatgccgagcgcgacggaaatcatatttatggcgttattcggggcacggcggaaaatcacggcggaagagccaataccctgacatcgcctaatccgaaagcacaagctgatttgttggtgcgtgcatatcgccaagcaggcatagatccaagcactgtcacatatatcgaagcacatggaacagggacggaattgggcgatccgattgaaataaatgggctgaaagccgcgtttaaggaactatccaatatgaaaggcgagagccagccggatgttccggatcaccgttgcggcatcggctcagttaaaagcaatatcggtcatttagagctagcagccggtatttccggtttgatcaaagtgcttttgcaaatgaagcataaaacgttagtgaaaagcctgcattgcgagacgcttaatccttatcttcagctgacagacagtccgttttacatcgttcaggaaaaacaggaatggaagtctgtcacagatcgtgacggaaacgagcttccgcgccgtgccggaatcagttcgtttgggattggcggagtaaacgcgcatattgtggttgaagaatatatgccaaaagccaattcagaacacacggctacaggacagccaaacgtgattgtgctgtcggctaaaaataaaagcaggctgatagatcgtgctttgcaattgcttgaggcgatccgcaataaaaaatatacagatcaggagttgcaccgcatcgcttacaccctgcaggtcgggcgcgaagaaatggatgagcgtctggcgtgtgttgcggggacaatgcaggaacttgaagagaaactgcaggcgtttgttgacggtaaggaagaaacaggcgaatttttccggggacagtctcatcgaaataaagagacccagactatatttacagcagatgaagatatagcgttggcacttgatgcttggatcagaaaaagaaaatacgccaaacttgctgatttatgggtcaaaggggtctcaatccagtggaacacattatacggagagaccaaaccgcgcctgatcagcctcccttcatatccgtttgcgaaggatcactattgggtgccgacaaaggaacattcagaaagagacaaaaaagaactggttaatgcgattgaagatcgggctgcatgctttttgacgaaacaatggagtttgagtccaattggctcagcagtgccggggacaagaactgttgccatcctgagcaatcaagagacagcagatttagcagcagaagtgtcttcgtattttccgaatcatctcttattagatgtgagccggatagaaaatgatcagtcagacattgattggaaagagtttgacggcctagtggatgtcatcggatgcggtaaggatgatgagggccggctggattggattgaatgggtgcaaagactggttgaattcgggcataaagaggggctcaggctgctttgtgtgacgaaggggctcgaatcgtttcaaaacacatctatccggatggctggcgcctcacgggctgggttgtatcgaatgctccaatgcgagtacagccatcttatatcaaggcatatggatgcagaggaggttactgatcatcgccgtctcgcgaagttgatcgctgatgagttttattccgattcttatgatgcggaggtttgctacagggatggtttacggtatcaagcttttctaaaagctcatccggaaacaggtaaggccacggaacagagcgcggtcttcccgaaagatcatgtgcttctcattacaggcggcacacgaggcatcggactattatgcgcccgtcattttgcagagtgctatggagtgaaaaaactggtgctgaccggacgagaacagtttcctccgcgagaggaatggactcgttttgacacctcgaacacatcagttgcccagaaaatccaggcagtgcgggagctggaagcgaagggtgtacaggtggagatgctgccgctgacgttatctgatgatgctcaggttgagcaaacgttgcaacatatcaagcgaacattaggaccgattggcggtgtcattcattgtgcaggtctgacggatatggatacgctggcatttatccgaaaaacttcagatgatattcagcgggtgctggaacctaaggtgtcaggtcttacaacgttatatcgccatgtgtgtaacgagcctttacagttttttgtcttattttcttctgtttcagccattattccggagctttcggcgggacaagctgactatgctatggccaatagctatatggattattttgcagaagcacatcagaaacatgcgccgatcatcagtgttcagtggccgaactggaaagaaaccggtatgggtgaagtgacaaatcaagcgtatcgggaaagcggcttgttgagcattacgaattcagaaggcttacgttttctagatcaaattttatcgaaaatgttcggaccggttgttctccctgcgatggcgaatcaaacaaactgggagccggaactgctgatgaagaggaggaaaccgcatgagggcggtttgcaggaagctgctttacagagcccgccagctagagacattgaagaggccgatgaagtttccaaatgtgatgggttattatctgaaacacagtcctggcttgttgatctgtttaccgaagagctgagaatagatcgtgaagacttcgagattgacggggtgtttcaggattatggcgtggattcgatcattttggcacaagtgctccagcgtataaaccgcaaattagaagcagcactcgatccatcgattctatatgaatacccgacaattcaaaggttcgcagattggctgatcggttcttattccgaaaggctgtccgctttattcggaggcaggatatcggatgcatcagcacctttggagaacataatattggcggaggcagctgttcctgcggaggatcgagctcttacacctcagattcaggcgccagcgattttgtcaccggactctcatgcagaaggtattgccgttgtcggactctcttgccgattccctggggcagatacattggagtcatattggtcgttactatccgaggggcgttcgtcaatcggcccgattccggcagagcgttggggctgtaagacgccatattatgccggcgtgattgatgacgtcagctattttgatcctgatttctttttgcttcatgaagaagacgtaagggcgatggatccgcaagcactgctcgtattggaagagtgtctgaaactcttgtatcacgccggttatacgcctgaggaaataaagggaaagcctgtcggtgtttatatcggaggcagaagccagcacgaacctgatgaagagagccttgatcatgccaagaatccgatcgtgacagtcggccaaaattatttagcggctaatctttcacaattttttgatgtccgcggcccgagtgttgtagttgacaccgcatgctcgtcagctttggtcggcatgaatatggccattcaggcgctgcgtggcggagatattcaatccgccatagtcggcggtgtcagcttgctgagctcagatgcctctcacaggctgtttgaccggcgcggcattttaagcaagcattcatccttccatgtgtttgatgagcgtgctgacggagttgtgttaggtgaaggcgtcggaatggtcatgctaaaaacggtaaaacaggcgctggaagacggagataccatatatgctgttgtgaaagcggcctcggtcaataatgacggaagaacggcggggcctgcaacacctaatctggaggcgcaaaaggaagtcatgaaagatgcgctttccaaaagcggaaaaaaaccagaggacatcagctatcttgaggcaaacgggtcaggttcaatcgtaaccgatctccttgagctaaaagcgatccaatcagtgtaccgttctgggcactcatcgcctctttctcttggctcaatcaagccgaacatcgggcatccgctatgtgctgaagggatcgccagcttcattaaggttgtgctgatgctgaaagagcgccgctttgtcccatttttatcaggtgaaaaagagatggcgcatttcgatcaacagaaagcgaacatcacgttcagccgagccctggaaaaatggacagattcgcagcctactgcggctattaactgctttgccgatggggggacgaatgcccatgtcatcgtagaggcgtgggaaaaagatgaaaaacacgccatcaagcgcagtccaatatcgcctcctcaattaaagaaacgaatgctttcgccaggcgagacaaagctggaagcggagacttcgaaaatgactgcggcaaacatatgggatacttatgaggtggaggtctaacgtgaaaaagataacgaaacaactcacattatcgttaaaaaatccgtttatttatcaccatgtggtttacggacaaaatgtcctgccgggattggcttatatcgatataatctaccagatattcagagaacacggcttctcctgctcagagcttcagctgcggaatttatccatctatcagccattgacggcggaacaggatgcagtaattgttctgaatatccaatgcgcggagaaaaaagaaggacagtggcaaatcacagccaagggaactgaaaaacgtgatgggaaagaagcttcagaagaaaagctctatatgaaggctgatatgtacgcagactccccagccatatttgaagaaacactggatctcagtcaaatcaaagcatctgcacagaacgttgttcagcttgatgatgtatatgaacaatgcagacgtcaggaattggtgcacagcgaatatatgaaagcaaaaggctgcatctatgaagaggaagatggcgtccttcttgagctttctctcggttcggaagccatgcttcacgcagaaggctttatgtttcacccgactctcatagacgggagcggggtgggtgccaatcatttgctcacatctttgcttaaaggagaacagaggctgtatttgcctctgttctatgaatccttttccgcttctgcacttttgcagtcgaattgcatgacgagaattaagcgctcctccgtccggcgggaaaaagagctgatttatgtaacacttgaattttttaatgcgtcgggagaaaaagtggctgagttgaaaaactttacaagcaaattggtgcgagaagcggagctgattagcggaaaacatcaagatgcacaggagacacagatgacaagagcggacactgctgagcgtgataaacctgctgacatggtatcttctcccgttaattcctatagtgaggctgaacagttcgtaagccaattaatcgcagagaaaatcaataagccggtagaacaagttgaaaaacaggtcggttattaccaaatgggactgaattcatcgggcttgcttgaggtggtagaaacgatcagtgataagatcggtgagagcctttcgccgactcttctgtttgagcataccaccatagcggaactgtcagcgtttcttgccgaggaatatgctgagcattttagtgccgctggttcccttggccttggccagaatgaaagagcacgcgtttccgacagcataaacgaccgtaagactgttgaagcttctcgtcctgcacctattgaggcagcaggcgatattgcgattatcggcttggcgggcaggtatccgaaggcagccaatattcatgaattttggaacaatctgaaagaggggaaggactgcgttagcgagattcctgagtcgcgctgggattggcagaaacttgaaggaatcacatctccttcgggtaaggacatttccaaatggggaggatttattgatgatcccgactgctttgatccccaatttttcagaatcacgccaagagaagcggagacaatggaccctcaagagcggctgtttttagaaacatgctgggaaacgattgaggatgcgggctatacgccaaagacgttggccaagcctaaaggacgaaataaaaggcagcatgtaggagtttttgccggtgtcatgcacaaggattatacattagtcggagctgaagaagcatcagcagaaaatgtgtttcctctttcgctcaactatgcgcaaatcgccaaccgtgtttcttacttttgtaatttccacggtccaagtatggctgtcgatacggtatgttcatcctctttgaccgcagtgcacttggcgttggaaagcatacgtcacggtgagtgcgatgttgcgttagcaggcggagtgaacctgtctttgcacccgaataaatatatgacatacggggtctgggatatgttttccactgacggacactgccgtacgtttggaaaggatggagacggttatgtgcctgcagagggtataggcgcggttttattaaagcctttgcgccaggcagaggaagacggagatcgcatttatgcagttattaaaggaagtgctgtgaatcatgtgggcactgtaagcggcatttcagtgccgagccctgtttcccaagctgatctgattgagacatgcttggagaaaacgggaatcgatccgcggacgatcagttatgtggaagcccatggaaccggcacgtccttaggagatccgatcgaaatacagggattagtgaaagcgttccgccaatatacgcaggatcggcagttctgttcaatcggttctgtaaagtcaaacattgggcacgccgaatccgccgcggggatcagcggtttaagcaaggttgctcttcagcttcaccatcaaaaacttgtgccttctttgcattcggaagaactgaatccgtacgttgattttgaaaagtctccattttatgtacagcatgaaacagaaacgtggaagcagcctgttatcaaggagaatggggaagacgtcccttatccgcgacgggcggggatcagttcttttggcgcaacaggttcaaacgcacatattatccttgaggaacatattcctcaagcagcggagcaggacgtttctttgtcctcagattctgacatatccgcagttattccgctttctgcccgtaatcaagaacgtctccgtgtatatgcaaaacgtctcttggattttcttcatgatgggattcagattagagatttggcgtatacattgcaggtaggccgtgaaccgatggaagaacgggtttctttcttagcatccggaattcaagaattgagcgaccaattgaaggcttttatagaaggacgaaaagccattcagcattgctggaagggccgcgtgtcaagaggaagcgaaccatcgcgtcccgccgaatcggtacataaattgctggagcaaagaaaactcgatcagattgcggagcagtgggcgaacggatctggtgttgactggaagctgctttacgagggaagcaaaccaaagcggatcagcctgccgacttacccatttgagagggtgcgttattgggtgccgaaagcggagaaaaagactgatcgttcaaaacaggagcggcacatcctgcatcctcttctgcatcaaaatgtgtccgacatatcgggtgtccgcttccgttcagcgtttacaggacgtgaatttttcttgaaggatcatgtcataaagggcgaacacgttttacctggcgcagctttattggagatggttcgggcagctgtggaaagggcagctgcggatcagttcccgacaggattccggctccggaatatcgtctgggtccggccgttcgccgtcacggaacagcagaaagatatagatgtacgtctatatcctgaggaaaatggtgagattacatttgaaatctgccgggaccctgaaagcgcagaggagtcgccgattgtatatgggcaagggagtgcagtgctttgtgaggctggtgaaaatccggttatcaacattgaagaattgaaggcaagctataatggccggacgctgtcaccttttgattgctacgaggcttatacagaaatgggtattcattatggtgacagccacagagcgatcgacagcctatatgccggcgaaaacggagttctagtgaaattgacgatgcctcctgtaatctctgatacagaagaccattatattctgcatccgagcatgatagattcggcatttcaagcatctatcggtttgaggctgggaggagctacgagtttagaagacagaaaggcaatgctgccttttgccatacaggatgtccaaatcttcaaaggctgcgaggcatctatgtgggcgcggatcacatatagcgagggcagtacagctggggatcgtatgcagaagcttgatatcgatttatgcaatgaagaggggcaggtttgcgtgcgattgacgggctattctgcaagagtgttagaaacaggtcaagaagatccttctgaagcgactgacacgctattgttcgaacatatttgggaagaacgtgctgcagagaggaaagagctcatagagtacgacacacataaagtcgttatctgtgatgttggagaacaaatggaaagcctccaaaatcatcttgactgtacagttctgcagcatgatacagagacaattgatgaacggtttgaaggttatgccatacagttatttgaagaaatcaaacagctaatgcactcaaaaacagggggacatacattcattcaagtggcggtgcctgcgttggacgagcctcagctattaagcggcttaactggattgctcaaaacggctgaactggaaaatccaaaactgacaggacagttgatcgaaatagagaccgggatgtcagctggtgacctattcgaaatattggaggaaaacagacgctatccgcgtgacacgcatatccgtcactggcaagggaagcgatttgtaagcaagtggaaagaagtgtctggtgagcacctaagagctgatatgccatggaaggataaaggcgtgtatctgatcacaggcggtgcaggcggtcttggattcatctttgcaactgaaattgcgaaccaaacgaatgacgcggttgtgatcctgacaggacgctctccgcttgatgaaaggaagaagaagaagcttcaagccttacagaaacttggcatccaagcgatttacagacaagctgatctggctgacaaacaagcggttgatgccttattaaaagaaacccaaaacgtttacggagacttagatggcatcattcatagcgccggtttaataaaagataatttcattatgaagaaaaagaaagaagaggttcaaaccgttcttgctccaaaggtcacaggactggttcaccttgacgaagcaacgaaagatattccgctcgatttctttatccttttttcctcaggtgccggagcagtaggaagcgcgggacaggctgattacgcaatggccaatgcatttatgaatgcatttagcgaatatcgtaatggccaagcagagctgcacaagcgttacggaaaaactctttcagtgtgctggccgctgtggaaagacgggggcatgcaaattgatgcggaaactgcaaggatgctgaaaagagaaacaggcatggtggccatggaaacagatcgtgggattcaggcgctatatcatggctggacgtcagggaacccgcaagtgttagttgcttccggtgttactgatcggattcgtgcatttttacatgaaacgggacatggcaaaggccaatctcacaatatcaaaaaaagcagtctcaatcaggaggcagaaaaagcagacatcattggggaaattgatgaagagatactaagagaaaaagcggagaactattttaaacaggtgctttcttcggtgattaagctgccagctggccagattgatgctgaagctcctctcgaggattacgggatcgattctatcatgatcatgcatgtaacgggtcaattagaaaaagtattcggatctttgtccaagacgctgttctttgaataccaggatattcggtcattaacccggtattttattgattcccgcagagaaaaactgctggacatcttgggatttgaaacgggaaaaccttctgttgaaagaaaatcagaacctgaaaaacaagaaatcccagttatcccaagaaagtctggatttcttcctttgcaagataaagagcagaagcaggtaagagagaaggaaacggaagaaattgcgatcatcggtatctcaggtcgctatccgcaggcagacaacattgatgaattatgggaaaacctgagggacgggcgagactgtattacggaaattcctgcagaccgctgggatcacagtctttattatgacgaagataaagacaagcctggaaaaacctacagcaagtggggcggcttcatgaaggatgtagacaagtttgacccgcagtttttccatatttcgccgcgtgaggcaaaattaatggacccgcaagagcgtttatttttgcagtgcgtgtatgaaacgatggaagacgcaggctatacaagggagcatctcggccgtaagcgtgattcggagcttggcggaagcgtcggtgtttacgtcggtgtcatgtacgaagaatatcagctgtacggggcacaagagcaggtgcggggaaggtctctggctttaacgggaaatccatcatccatcgcgaaccgagtatcttattattttgattttcacggaccgagtattgctttagacaccatgtgttcttcttctttaacggctatccacttggcctgccaaagcctgcagcgcggagagtgtgaggcggcattcgcgggcggcgtgaatgtgtcaatccatccaaataaatatttgatgctcgggcagaacaaatttatgtccagcaaaggccgatgtgaaagcttcggacagggcggagacggctatgtgccgggggaaggcgttggagcagtgcttctgaagccattgtctaaagcagttgaagatggtgatcacatttatggaatcattaaggggacagccattaaccacgggggaaaaacaaacgggtactcagttcccaatccgaatgcccaagcagatgtcatcaaaaaggcgtttgtggaagcgaaggttgacccgtgggcagtcagttacatcgaagcccacggcacgggaacctctctcggtgatcctattgaaatcacagggctgtccaaagtgtttacgcaagaaaccgatgacaaacaattttgtgcaatagggtcagccaaatcaaatatcgggcactgtgagagtgcggcaggtatcgcaggagtaacgaaggtattgctccaaatgaaatacaggcagcttgcgccttccctgcattcaaacgtgctgaacccgaatattgatttccttaactcgccgtttaaagtacagcaagagctagaagagtggaagaggccgatcatcagtgtcaatggcaaagacatcgaattaccgagaatcgcaggagtctcttcatttggtgccgggggtgtgaacgcccatattttaatagaagagtatgattcggaacctgtggaggagcgtttaccagcgaggaaacagccggctgtcattgtgctctcagcaaaaaatgaggaaagacttcagaaacgcgcggagcgattgctgcataccattcgtgaacaaacatatgttgaagcagatttacaccgaattgcctatacgcttcaagtcggacgggaagcgatgaacgaacggctggcgttcgttgcggaatcgatgcgggagcttgaagaaaagctgaatgaatgtatctccggaacagaaaatcgtgaatatgtctatcgcggacaagtaaagcgcaacaaagaagccattgctgcttttgctgctgatgaggatatgtcaaaaacaattgaggcatggctgcaaaaaggcaaatatgcgaaggttttagacctatgggtaagaggtttgcgcatcgactggagcacgctatatcaggatcaaaaaccgcagcgcatcagtttacctgtctatcctttcgcaagagatcgctattggatagacgtacatgcaatggctgaggaaaaaagaacggaggagccattcgctccggtacagcccgtccttccaaagccgtctgtagccagagaagccagcggcaagcctgccaatattacgttacagcctttaatgaccaatcaggatcgtttagagcgttttccatcagatacagaaacagagacgatcacggcggaagccttgtgcgatgaactgacagcgggcttagcggaagtgctgtacatggaccaaaacgagattgatccagacgaagctttcatagatatcggtatggactcgattaccgggctcgaatggataaaagcaataaataaacagtatggcacatcactaaatgtcacaaaggtatatgattatccgacaacacgtgatttcgctgtttacttagcacacgagttaagcacacaggctggggagaaaaaacaaacggagacgtacacgccgatcagacaaaaaacagcggtacctgctgctaaaccggctaatatatctctgcagccgttagaacatcatcagccagtgcaagaggagggtgaagaaacgattcaatatgcagcggcagaaatatctgcatcaagacaatatactgtagcaattgaaacgctgcatgaaaacttgagggaaagcatagcagacgtgttatacatggagccatacgaggtggatattgacgaagcgttcatagatatcggaatggactcgattaccggactcgaatggataaaagcggtgaacaagcaatacggaacgtcttttacggtaaccagggtatatgattatccaacgatacgtgattttgccgaaatgctaaagtccgagcttggaactcatcatgatagagaggtagagcatactgttcctatcgaagcagtccagcaaaagccagcagcaccatctaatccaaagccggcagaacggccccttcagcctgttcaacatccaataaagaaagaacatgagaagaaaacggtacctgttcatcaagactacccggaggatgcgatagcgattgtcgggatgtcgggaagatacccgggcgctcgtaatgtaagagagtactgggataacctggttcatgcgagaaatgctattcgggacattccaacatcacggtgggatgttgacaaatactatgatcctgtcctcaacaaaaaaggaaaagtctattgcaaatcaatggggatgcttgatgatattgaacattttgatccgttgttttttaatattccgccgtcagaagctgaactgatggacccgcagcatcgaatctttttgcaggaaggctataaagcctttgaggacgctgggtacaacgcccgaactttaaatgagaaaaaatgcggtgtatatctcggcattatgagcaatgaatacggggtcatgctgaaccggcaggcaagagcaaatgccaccgggaacagctttgcgatcgctgcggcgcgtattccatattttcttaatttaaaagggcctgcgattcctattgacaccgcttgttcatcttcattggtcggcacacatttagcgcggcaggcacttataaacaaagaaattgatatggcgctggtcggcggggtcagcttatacctgacgccggaatcttacatcagtatgtgtgaggccggcatgctttcacctgatggacaatgtaaagcatttgacaatggcgcgaatggttttgtgcccggcgagggtgcgggtgcgctggttctgaaaaggctgaaagatgcagaagcggaccgtgaccatatttatggcatcatcattggctcgggtattaatcaggacgggaaaacaaacggaatcacggcaccgagtgcaaaaagccaaatggacctggaaagagacatatatgaaacatacggcatacatcctgagagtatcagttatgtcgagatgcatggcacaggaacaaaacaaggcgatccaattgaattagaagctctgtccaccgtatttcaagaaaaaacagacaaaaagcagttttgcgcaatcggttccgtcaaaagcaatattggccatacatccgcggcggcaggagtagccggggttcaaaaagtgttattatgtatgaatcataaaacacttgtgccgacattgaacttcacgacaccgaatgagcattttgaatttgagcattctcctttatacgtaaatacggagcttaagccttgggaaacgggtgatggaaaaccgcggagagcatgtgtgagctctttcggatatagcggaacgaatgcccatatcgtgatagaggaatatcagcctgaaaagaggagcgatccattaacaaagcagcaccgctcagcattatttgtactttcagcgaaaaaagagaagcaattgaaggcctatgcggaagcaatgaaagatttcgtaacttccaatgaagatatcgatctggaggatatggcatacacacttcagacgggccgggaagcaatggattatcgcatggcgtttttggcggattcgagagaaatgctgatcaaagctttagatgattatttggctgaaatgccgaacggcagcatatttgctgctcacgtgaaaacgaagaagagcgaaatcaagctgtttgaaacggatcatgatgccaaagcattgctgcaaacatggatagagaaaaaaaggctggagaaagtagcagagctatgggtgaaagggctgcagatagattggaacaagctttatggggaatacacgcctcgccgaatcagcctgcctgcttatccgttcgcggaagagtattactggctgccaactcaagaaggcgaacccgaaaccattgctacagcaatgcctcaattcgaactgatgccaaagcgctgctttctgcgtaaacagtggcagccttgtccgattgaaccggcagaaatgacgaatcaaaccgtcgccattttggcaaatgaggagacaatggcattagcggaagagctttcgacgtatttctcgacataccgtatatttgacagccaagagctggatcgggtatctgctgctgactatgaacacgttgctggagcaatcgatctgatcgggtgcggaacgagccatgagcattctatgggctggataaactggctccaaaagctgatcgagcaaggacgtgcaagcaagcatcatttgacggtcttgggtgtaacaaaggggctggaggcctacgcaaatgagggtgttattttgtctggtgcttcacgggccggtttataccgcatgcttcaaagtgagtacagccatcttacttcaagacatgcagatatggaatgcgaagcctctcatgaggagctggccagactgattgcagttgaatattatgccaagagcacagaatcagaagtctgttatcgaaacggacagcgatatcgcgcatatttgacagagcagccagcagaagccgctctaagtcataagcaagtatcgttttcaacagacaaagtcctgctcattacaggcgggacaagaggtctcggcttgctgtgtgcgcggcattttgtgaaaacatacggcgttaagcggctggtccttatcggccgtgaagagcttccaccgcgtgaccagtggaatttggtaaaaatttcctcgcttgccgagaaaataaaagccgttcaagagctagaagacatgggtgcgcaagttcaggtgctgtctctggatctcacagacagggttgctgtcgaacagagcctgaagacaatacacgaaacaatgggggcgattggcggagtcatccattgtgccgggatggtgaacaaacaaaacccggcttttatcagaaaatcactagaagagatcggacaggtttttgaaccgaaagtcgaaggtctgcaaacgttgtttgacctgcttcaagatgaaccattggcgtttttcaccttgttttcatcagtatcagcggccatccctgcactagcagcaggacaagctgattacgcgatggcaaatgcttttatggattattttgcggaggctcatcaagataaatgtcccattgtaagcattcagtggcctaactggaaggagaccggtttaggcgaggttcgaagcaaagctttagaacaaactggattgatcagtttgacaaacgacgagggattacagctgcttgaccagattctatcagacagacagtatgctgtcgtgctgccggcagtaccagatacaaacgtttggaagccggataagctgatgcagccgtcattgcctgtcgaagctctctcgcatcctgagacgaaagagcaaaccggcactcgcaacctgttccctgaaacagtcgactggctcgtaactcttttttcagatgaactgaaaatagctgcagaagactttgaaacggatgaacctttccaagaatacggaatcgactcgattatattggcccagctggtacagcagatgaaccaacaattaaatggagatattgatccgtcaatcttgtttgaatacccgacaatagaatcctttgcacactggctcatttcgaaatatgacatatcagctgttttacagccatctgttcctgagaaacagacacctctcaagccgcaatcagcaatgaaacagaagctggtgccagaacagcggccgcaacagataagccatgaaaaaacggcacttcttgctgaggacatcgctatcatcggtcttagttgcaggttcccgggagcggaaaccctagaggaatactgggatttaatacgtgatggacggtctgcgattgcgcctgttccgcctgaacgattcgggaactccagctcgaattacgcgggcctcattgatgaaatgaaccgatttgatcatgatttcttcatgatgtccgaaagcgatgtcagagcgatggaccctcaagctttggctgtattggaggaaagcttgaagctatggtatcacgcgggttatacagagaaagaagtgaaaggcatgagggctggtgtttatataggaggccgcagccagcacaagcctgatccggccagtctttcaaaagcaaaaaatccgatagtcgctggtggacaaaactatttagcggctaacatctcacaattttttgacttgaagggaccgagtattgtcctggataccgcttgttcctctgcactggtggggctgaatatggccattcaggctctgcgaagcggagatattgaggcagcggttgtaggcggcgtcagtttgcttgatgctgatgcgcatcgaatgtttcatgagcgcggacttttatgtgacaaaccgtcattccatatttttgataagcgggcagacggtgtcattttaggagaaggcgtgggcatggttctcgtcaaaaccgtcagccaagcggttgaagacggagattccatatatgcagtcattaaagccgctgcgattaataatgacggaagaacggcaggcccatcatctccgaatctcgaggcacaaaaggacgtcatgctgtcagcgcttgaaaaaagcggcaaaaagactgaagagatcagctatctcgaagcgaacggatcggggtcggcagtaacagatttacttgaattaaaggcaatccagtccatttaccgttctgaatcaaaggctccgttagggctgggatcggtgaaacctaacatcggccatccattatgtgcagaggggattgcgagcctgattaaagtagctttaatgctgaagcatagacaattggttccgttcctgtcaggtaatgaaaatatgccgtattttgatatagaaaaaacagatttgtatttcagcagatcgcaagccgagtggaaggagacaacgccggctgcggcaattaattgttttgcagatggcggaacgaacgcccatctcattatagaagcctggaatgaatcggttgctcgtccaattagaagaaaacctctgcctttgccggaattaaataggcagcccgttttaatcaaaccatcagctcaaaacgtgcaggaaaaagtgcattcagacacaggggcttctaaagatatgttttggaaaactttcaaataagagaggagtgggaaaatgataactgaacaactgcacatttcattaaataatccaatcatgtccaaccacaaggtatatggacaagcgttattacccggccttgcttatatagatttgatctaccaagtattccaggaacatggttatgtataccaagagcttgaattaaaaaacctgaccattttttaccctttgatcgcagatgagtcatatgacattgccctgaccattcacgtgtctgaaagaaaggaagggacatggtccatcatcatcgacggacaaaaacagcatggagaatcactatctgacaagagacaatatgtgactgctgacatgcatcgtaaagagcaaaccgcttttgccgaatcaatagaccttaatcagtggaaaagtacagctgacaggattctgaatttagatgaaatctatgaacaatgccgatctcaagagttagtgcataccggcatgatgaaggcggaaggacagatttatgaagccaaagagggggctgtaattgatttagcagtcggacaggaagcattgcgtcattctgatgcttttctgtttcatccgacgcttattgacggcagcggcataggttcaagctgcctgatctcagatcaaacgatgtacctgccattgtattatgaatcgttttctgcttcagaacgattgcaaaaaggatgtacagcacggatcctctcctcatctgtgcgccaaaagaaagagctcacttatatgacgattgaatattttaattcatcaggacaaaaagtggccgagctgaaacaatttgcaggcaagtctgtacggaatatgtcagcctttcattctccaaaagaaattcaagaagaaagagctgctgtctctcagaacatcagtcaggactatcccgcatttgaaatgtatttgcgtcagctgcttgctaagcagcttgaaaggccggcagaacaaatggatatccacgctgggtactatgagcttggtctggattctccgtcattgcttaccgtggttcaggaaattggagataaggttggagcggatcttgctccgacactgctgtttgaatttacaacaattgcagaactagctgctcatcttgctgatcactattcaattggagaggcggacgatgctgtccgccaatctccttcaccaatgaaggattctcctgatggtgttacctcttcaccagagatcggggaggacattgccattatcggaatggcgggacgctatcctaaggcaaaaaacatacaggaattttgggaacatcttaaagcgggtaccgactgcatcacagagattccaaactcacgctgggagtggaaagaaaacaatggacaggattcacctgcaggcaagccactctcgaaatggggcgggtttatcgaggaggctgattgctttgatcctcaatttttcagaatctctccgcgtgaagcggaaatgatggaccctcaggaacggttatttttagagacatgctgggaagctattgaagatgcgggttatacaccagagacaattgcttcaccgcagggagaaaataaaagacagcatgtcggtgtgtttgccggcgtaatgcataaggactattcccttataggggctgaagctctatcagaacacaatccatttcctttatcgctgaattatgcgcaaatcgccaacagggtctcttactattgtaatttccacggcccaagcatggcggtggacacggtctgctcttcctcattaactgcggttcatctggcaatagagagcatccggaatggagaatgcgaggccgcgcttgccggaggcgtcaatttgtcattgcatccggctaaatatatcagctatggcagtgtaggaatgcactcaagtgacggctattgccatactttcggcaaagacggagatggctacgtatctggagaaggtgtcgggacagtattgctaaaaccgctgcgaaaagctgaacaggacggtgaccgaatctatgctgtcatcaaaggaagtgcgataaatcatgtaggaaaagtaagcggaattacagtaccgagcccggtagctcaagctgatgttatcgaagcgtgtctagaaaaaacaggaattgatccgcgcaccatcagctatgttgaagcccatggcactggcacctcattgggagatccgattgaaatacaggggttagtaaaagctttcagccgcaatacgcaggacaagcaattctgttcaatcggttctgttaaatcgaatattggccatgctgaagctgcagccggcattagcggcttaacgaagactgtcctgcagctgcatcataaaaccttggtgccgtcattacattcagaagagctgaatccttatttgaagcttgatcaaaccccattttttgtccagcatgaaacaaaggaatgggggcagccatcttttacagaaaacggggtggacgtcacatatccccgccgtgccggtttaagttcgtttggcgcttcaggatcaaatgcgcatcttattttggaagaatatattccggccgagagccattcagaaacgattttaacgaaaaatgaaggaatagtgatacctttgtctgcgagaaacaaagatcgtctgcaggcttacgctcttaaacttcttgattttcttagcgaggacgtcaatcttttagcgttagcttataccatgcaggcagggcgggttgaaatggaggagcgtgcggccttcatcgtaaaagacataaaagatttaacggctaaacttcgggcgtttgccaatggagaagaagagatcgagggctgctggaccggacaagccaaggagaatcaggaggcggctgggctagcatcggtaaatgcgctgaataacaatttgacaacagacagtgaaatgatggaaatggcgaaagcatgggttcaaggacagcgggtcacctgggacgacctatacggcgatcgcaagccgcttaaaatcagtgttccgacctatccgtttgcaagggagcgctactggatcccggttcctgaaatgaaaaccagcactgtgaatcatatcttacatccgctggtgcaccgcaatacatcagactttactgagcagcgctttagctctgtatttacaggcacggaatttttcctttcagatcatgttgtacagggacagaagattttgccgggcgttgcctatttagaaatggcaagggaagcagcggaaaaagctgcaggcgatctggacggcaaacaaagagtggtgtcgcttaaagacattgtgtgggtgcgtcctatcacgattgaaagtgaaccaaaagaaatacatattggcctttttcctgaggataacggggaaatctcctttgacatttatagcagctctgaacataaagaagaagccctgacgatacactgccaaggccgcgctgtcatttcagatgaagcggacacttccattttaaacctttcatcaatacagacagaatgcagtttggacacagtgacgtcagaacaatgctatgcagcgtttcgaaagattgggcttgactatggagagggctatcaagggattgaaaaagtctatgtcggcaaagatcaattgcttgcaaaaatctcgttacccgcttttctaaaaaacgacaagcagcattttgcgctccacccgagtttgatggattccgcgttccatgccacagtcggttttatcgttagctcagtcaatgccgctggacaagctcagacgctgtctcttccatttgcgttgcaggaggttgatattttcagcccatgtccagagaagatatggtcttatattcgatacagttcagacagtaaagcggaggacaaagtcagaaagtatgatattgatttatgtgatgagaacggacacgtttgtgtgcgaatgaagggtgcctcgatgcgggcacttgatggagagcggcattcaaggtctcaactagtaactgattctcagctgaccgggcatacgatgatgatccccgtctgggaaccagtctctctagaagcggaggataatgcttcgtttgctggtacacgagttgttttatgcggtgctgctgaagctgatcgggcattaataaagcatcattatccgcaagtatcctttatcgatatccggcctgcagatgacattgagggaatagcggacaaactgcaagcgtacggaagcattgaccatgttttgtggattgccccgtcacaccggggaagtataggtagtgatggacaagaagaagctgttcttcacttatttaagcttgtgaaagcatgcctgcaattaggctatggcgagaaacaacttgaatggtctcttgtgacaatccaagcgcagccggttacgcaacatgaggcagtacaacccgctcatgcaagcattcatggacttgccggcacaatggcaaaggaatatccacactggaaaatccgtcttctcgatcttgaaaaaggctgcacatggccggtaaatcacatgtttgcgctcccagctggccgccttggccatgcttgggcctatcgtaatcagcaatggcatcagcagcaattgatcccatatcggcactcactgtcaggcgacacgctatatcggaaaggcggagtctatgtggtcatcggaggagccgggtatatcggagaggcgtggagtgagtacatgatccgccgctaccaagcgcaaatcgtttggattgggcgaagtcaacttaatgctgccatccagtcaaaaatagaccgactttcggcgcttggccctgagcctttctacattgcagccgatgcagccgataagcattcattgcagcaggcttatgatcaagtgaaaatgcgccatcctcatattcacgggattgttcactctgcgatggttttatttgagcaaagcctggaaaaaatgaagccggaagaattcaccgctggactggcggcgaagatcgatgtcagtattcggatggcccaagtgttccgccaggagaatgtagattttgttttattcttctcttcgcttgtagcccatatcaaaaatgtgaagcaaagccattatgcctctggctgtacatttgcagatgcttttgctcaccggctttctcagagctgggcatgccctgtaaaagtcatgaactggggatattgggggaatagtgaagcggctgaggatgaacattatgtacagctcatgaatcaaatcggcttaggtttaattgagcctgcggaagctatgaaggcgctggaagccctgctttctgggccagtcagccaaacagctttcattcatacgacaaagcctgtagcagtcgaaggcgtgaatcagaatgaattcatcgctctttatccagagcaaccttcagcagatgcagagagcctgatggagcgtctgccgactacggcacgatttcaaagagtgacacatgaagagcttgatgatcttctttacaggctgttgttaggacagcttcaaacagccgggctgtttgatggttatacattatcggttgaacgtcttcaacaatataagactcgtgaattttatggaaaatggattcggcaaagcagcgaatttctcttgcagcatggctatcttaagaaagttggagattcattggtgaggaaggaccaagcagaggatatcgagctgctttggcaagaatggaatgcgaaaaaagaaaagtggcttaaagacagcgagacaaaggcgatggttgtattagcagaggccatgctgaaagcattaccggatattttgacagggaaagtccctgcaacagatatcatgttcccgcattcctcgatggaactggtggaaggcatttataagcataacaaagtggcagattattttaataaagtgcttgccgatacattattagcttatctggatgaacgtctgaagcacgaccctgaggcatcgattcgcattatggaaataggcgcaggcacaggcggcacgagtgccggaatctttgaaaaactgaaaccatatcaaaagcatatcaaagaatattgctatacagatctgtctaaagcatttttgctgcatgcagaaaaggaatatggggcggaaaatccgtacctgacatatcagctttttgatgtggaaaaaccgattgatcagcaggaatttgaagcgggaggctatgatgtcgtcattgccgctaatgtccttcacgcaacaaaaaatatccgtcaaacactgcggcatacaaaagcggtaatgaaaaacaacggaatgctgctgctgaatgaaatggcgggaaacagcctgttccctcacatcacctttggtcttttggaaggctggtggctgtatgaagatcctgcagtgcggattcccggctgtccaggcttacatcctgacagctggaaagcggcacttgaaagcgaaggctttgaatctgtctttttcccggccgaggcggcacatgatctgagtcaccaaatcgttgcagcctcaagcaacgggctggttcgccgtatgatgaaaaatgtgatcttgccggagaaggttgtttcacaagcgtctaatcaggagccagcctacattcataccatagattcagaggaagctggacaatcaaaacatgctctcctaagagaaaaaagcacagaatatatgaaaaaactaatcggggaaacgttgaaaattcctgcaggaaagattgagtcatctgaaccgcttgaaaagtacgggattgattctatcgttgttgtccaactgacaaatacattgcgtaaagaatttgaccatgtaagcagcactttatttttcgagtaccagaccattgacgcattagttgatcatttcatcaaaacaaaaacagaagcgctgatgaaattaacaggtcttgaccgtcaagttcaacaacagacaccggccgaaagcagaacccaatcctcacagaaacctgatcaggccgctaaaagaacacggcgctatcgcaagcttggcttcagcggggagaaagaaacaccgacaaacactcttgcaagccgtgacgttgccattatcggcatttctggacgctatcctcaggcggaaacagcagaagacttttggaacaacctaaaagaaggaagaaattgtattgaggaaattccgaaagatcgctgggattggaaagcttattacgataaagaaaaagaaggatcaatttatacgaaatggggcggatttatcaaggatatggacaagtttgacccattattctttcagatttctccgcttgaggcagaaagaatggaccctcaggagcgattatttctgcaaaccgcttatgcaagtattgaagatgcgggatacacgcctgactcgctctgttcaagcagaaaaatcggcgtctttgccggagtcatgaacaaaaattatccgaccggctacggctattggtctatcgccaacagaatatcctatttactgaatttccaaggcccgagtcttgcagtcgatacagcctgctcatcctccctgacagcgattcatttagcgctggaaagcatctatagcggatcgagtgattgtgccattgccggcggtgtcaatttagttgtcgacccggttcactatcagaatttatctgtcatgaatatgctctctgctagtgatacatgtaaatcattcggcgatgatgcagatggatttgtcgacggtgaaggcgtaggcgccattgtgttaaagccgctgcagcaagcaatagcggacggtgaccatatttacggtgtgataaaggcaagtgccattaatagcggaggaaaaacaaatggatacacggttccaaatcctcatgcacaggcacaggtaattaaagaagcaatggagcgcgccgacattcctgcccgaaccatcagttatttagaggcgcatggaacaggcactgcattaggagatccgattgagatagcggggttaacaaaagcatttgagaaagatacgcaagagaaacagttttgtgcgatcggctccagcaaatcaaatatcggtcattgtgaaagtgcagccggaattgcagggctgacaaaaatactttttcagtttaaatatggccaaattgcgccatcattgcatgctcagcggttgaatccgaacatcgagttcagccatacgccatttgtcgttcagcagcaacttggtgaatggaaacgcccggtgattggcgggcaagaggtgcctaggcgcgctggcttgagcagttttggcgccggagggtccaatgcccatatcatcctggaagaatatattccaagaacgggggcgcaaacgccgaaagaccatcctccagcgctgattgtgctgtcggccaaaaacatggaacgcttgcaagaaaaagcggaacagctgcttacagccatcaaacaaaaaaggtaccgcgaaacagacctgatcaggatcgcctataccttgcaaacaggccgtgaagcaatggaagaacggctggcctttatagcggaatcactagaggatcttgagagaaagctgaacgattttatcgaaaacaaagcagacagcctgtatctggatcgcatcgaggataacaaaaaagcgttagcagttttatcagcggatgaggatacggaaaaaatcatagaagcatggatgagcaaagggaaatacacgaaactactggatctttgggtgaaaggcttgtctttcgactggggcatgctgtacggcacccaaacgcctgtccggatcagtcttccggcatatccatttgcaaaagaacgttactgggcaccaggcgcggcaaaggctccggcgtctatagaacaggatcatgatcagcaaacagaagaacctttcaaggttatgacttttcaagaagtgtggaaagaagagccggcgactctcacatcgaaacgtatcaaaacgctcatctgttttctgactgaaagagaaaagcaaaacgcatttgcttcagccctgaaaaacgttgatcaagacaccaaggtcatttttatatcacagggcgaagtgtacagcaaacagtctgaatatagctaccagattgtgcggcaagaacccgttacttttgaaaaggccttccagagcattaaagaagaacttggagagccagatgcaatcctctatatgtggcctatggaagacaagcgctgtataaaggaccattcctgtattgtttacctattacaaggtatgtccgcagcaaagcttcatccttcacggctgctgctggcaggatgttttgaagatggtcttgaccgaagttatctggaatcatggattggcttcgaacgttcactcgggcttgtcctcccgcacacaaaagtgactggaatctttcagccggtggaacaaggatcgatggatgattggacacgtaaaatatggggagaattacaggcttcagctgaacaaacggttttgtatcagaatctgaaacgatatgtaaatcacattgaacagacaacgatacaaccggacgacagcaaattgaagtctggcggtacttacctgattacaggcggtgtaggagggcttggttatttatttgccaagcatttggccaaaaactatgccgcaaacctgattttgacagggcggtcgccttttaatgatgaaaagcaaaagcaaataaaagaattaaaggatctaggcggcgaagcgatgtatgcagaagcagatgtgtctgatcctatcgcaatgggagactgcgtaaaaagagggaaagaccgattcggtgccatcaacggtgtcattcatgcagccggaatcgagagcgactctgctatttttgacaaaaagatcgaaagctttcagcgcatcattgaaccgaaaatcaacggcacgatagcgcttgatgaatggcttaaaaatgaagaccttgattttatgtgttatttttcttcttcttctgcggttttaggggattttggatgttgtgattatgcgattggcaataggtttcagatggcttacgcacaatacagaaatgagctgcataacggtaaaacgtttgtcatcaactggcctgtatggaaggatggcggaatgaagatcggtgatgaggaaacaacggatatgtacctgaaatcaagcggccaacgcttcctagaagccgaggaaggcatccgtatgtttgagcacatcctagctcagcaggatgctcagcatctcgtgatagccggtcagcccagccgtgtcagcagatttttaggaatgactgaaccagctattccagaaccggccactcaagcccctctagcacaagaaaacaaggatgaggtaaaaacgttaagcattgaaaagcgtttagaacacgacttgaaagagcatattcacacattgcttaagatttcaaaggacaagctgaatttgaacaaaaattgggccgacttcggatttgattcaatctatttggctaaattctcgaatgtgttatcaaagcatttcaacatcgaagtgacaccggctttatttttcggctattcgactttacaagaattgatcggctttttcttaaccgatcataaagagctgattgaagcattttaccgggatgatgcatcagaggcgcaaaagccccctgaagcttatgcagcaattcctgtagctccagaaccggaaaccagtaaacaaagcattcggcaggttcacgatgagcctattgccattatcggcatgagcggcaggttccctcaagctgattcggtccatgagctgtgggataatctgaaaaaaggtaaatcgtgtatctctgacatcccgggcgaacgccgggactgggggagagctaacagagatccagaaaaagcagtgccaaggtggggggcatttttgaagggcatagaccggtttgatccgctgttttttcaaatatcgcctaaagaagccgaaagcatggacccgcgccagcgcatttttctagaggaagcatggcacacgtttgaagacgccggctatatgggagatcggataaaaggaaaatcctgcggtgtttatgtaggtgtggaagaaggggaatatgcgcatctaaccggagatacggattacattaacggaacacaaaacgccacattgtctgcgagaatcgcatacgcattggatttaaaagggcctaatatggctttgacagcagcatgttcatctggactggtagcgattcaccaggcatgttcagctctgcgtcagggggattgtgaaatggctttagccggcggcgtcagcttgaatatttctcacatgtcttttgaggcgctgacaagggccgaaatgctgtctccgaacggacaatgcaaagtgtttgaccaggatgccaatggtcttgtgccaggtgaagcggtggctgctgttctcttgaaaccattatcaaaggcaattgaagataaagatcatatttatggctgcatcaaggccagcggcgtgaattacgatggcaaaaccaacggcattactgcgccaaatccttttagccaggcagaattgatcgaaaacatttatgaaaaaaatgaaatcaatccgctcgatattcaatatgtgatggcgcacagtaccggctcgaatcttggtgatccgcttgaggtccaagcgttaacgagcgtgttcagcaaatatacgaagcagaagcaattctgtatgatcagctcaattaagcctttaatcggacatacatttgcagcgtcaggaacggttgctttaatcagtatgctgatggctatgaaaaaccagatgattccggccactcatcactgtgaatcggaaaaccagtatattccgtttaaagaaagcccatttgtgctttgcaaagaaaaccgttcgtggatcaggaaatatcagaagccgaggatgggaacgatcagcacgactggaatcagcggcaccaatgcacatgcagtcattgaagaatacattccggaagatcagccgcccacacagcggcatcaagggtcaccgcaggtcatcgtgctttcagcccaaaatgacgatcggcttcaggatgctgcctgccgcatgattgcgtatctggagcagaatcataacctttctttacctgatatggcatatacgcttcaggttgggagaaaagccatggaagcaaggctcgcgatcgttgcaaacaatcagaagcaattggtgcaaaaattgaaggaatatgtggaagcaatgaagaatggtggggtatcaggccaacagagatccctttatacaggatatacagaagggattttagaagaacaagatgaagcagttctgcaagctctcgcaaaagaaagaaatttggaaaacatcgcggattgctgggtgaaaggatatcagattccttgggaactccttcatgatggcgatcacgttcgaatggtttctttacctggttatccatttgcaagggagcggtattgggtttcgtcaggcacccagcaatcagtggccgttaaacagcattcacaagatatgaaaacagagattgacgagccgaatggcaaaaaccatattcaaaagatcattgttcaatttttagcacgagaattgggcatatctgaggatcgaatcaatttcaaaagaaactttttggattatgggatggattcaattcttggccgaaaattgatgcggcatatcgaaaaaaccacgcagctgaagatggccggtcgggaaatccttgaatgtcagacagtccaagctctatctgaccatttggccttaaaagcggaaaaacaaaatcatagcgcagcagcacatcaaataaaggacacgtatacagacgggcaaatcatcggattaatgcaagaggtggcgctagggaaattggattttaagagtgtgcaaaacatcatagaagggagtaaatcgtatgaatcataaagaaattctcgatgccttcagatcaggagaattaaccatttctgaggtggaagaacatcttaaaggcatgaagcggcagttgaaaagcccgctttctgaagggcaaaaagggctgtggatgcttcaaaaaatgtctcctgggatgagtgcatatcatattcctttatgctttcgcttcagcaaaccaatacatgcagagacgttcaagaaagcccttctgtttgtacagagacaatatccgatcttagccagtgtgattcaagaagaaaatggcattccatttcaatcggttcagttatcaaaggatctttattttgtggaagaggatatatcagcaatgaaatcagcagatatctttccttttctaaaagaaaaagcaaaagaacctttccagttggaagctggtccgttatggcgcacacacctttttcatcggttagaagaatgcattgttcttataacaattcaccatatcatatttgatggtgtgtcgatgctgacattgatatcggcgctattcgaagcgtatcaacaattgctgaatgggattgagcccttgcagcagccattaacagctgattattacgattttgtcgattgggaaaaacggatgctgactggcagagaaggggaagagcatctcgcttactggaaagaacagttgtctgggagtctgccagttcttgatttgcctgctgaccgtccgcggtcttcatcacgaaaattcaaggggcaagcttataaaagcttgctcccccatcacctgagcaatcaaattaaatcgtttgcccgcaccaatcatgtgaatgaatcggttgtgtttctctccatttacaaagtgttgctgcatcattatacaaaacaaaaggatatcattgttggcgttccgacaatgggtcggcaagatgacagatttgaaaccctaatcggttattttatcaatatgatggctgttcggagcaagaatatcggatctcagccattaacagcatttattcgggaactgcagctgacagtggctgacggcctggatcatgcggcgtttccgttccctgcattggtaagagagctgaatgtagaccgatcggccgcggattctccggtttttcaaacagcttttctgtaccaaaacttttttcaggcaacaggcttgcaaaaagtgctcgaaccgtatcaaacgcttggcatcgaatatattgaagacattcggcaagagggtgaatttgagctggcgctcgaaatatatgagcaagaaaatgaaacagtgcttcatcttctgtacaaccctgatttgtatgaactgtcctccattgaaaacatgatggagaactatatgaagctcgcgcaacacatgatggatgacccgtctttgccgcttgaagcctactctttgcgattaaatcaagaacaaactaatttggtggaacaatggaatgcgacagggacaaacatcgcaaatgacaagtgtatacatgaggtgtttgaggaaaaagcgaaacaaacccccgatgcggttgctgtgatgtttgaagacagatcacttacatataaagaagtagatgaaaaaagcacatctgtggcagtctaccttcaacatcagggtgttagacctgaacagcccgttggcatttgtgcagagcgttcgtttgatatgatcatcggaattttaggaatactgaaagctggcggagcgtatgtgccgttagatccaagttttccgcaagaacgattagagtacatgctcaaagacagtcaggcatccattgtcctcacccaacctaacgttcatgataggatcagcggattaactggcagccatgtaaaagcgatcaatatcgagttagcttgccgaaacgattatacagaccagcaaagcagcggtttaaagcgggaagtaaaaccggaacacctcgcttatattatttatacatcgggaagcaccggagagcctaaaggggttatggtagagcatcggagcattatgaataccctgaattttcttgaatctcactatcctgtaacggctgaggatgcatatttattgaagacgaactatgtgtttgatgtatcgatctcagaattattcggatggtttattggagacggccgtcttgtgattcttccgcctaatggggagaaatcaccgcagctttgcatggattatattgaaacatataaagtgactcacattaattttgtgccggccatgctgcatgtttttttagaaatggcgaaagacaacaaacgattcacagaggatggtccgctgaagtatatgatggttgcaggtgaagccttccctaaagaattagtgaaaaaggcggtatcactctttacaaactgccgtgttgaaaatatatacggaccgacggaagcctccatttacgctgcgtatttcggatgcggaaaaggagatatcgcaagtcaccatacaccgattggaaagcctgtctccaacacgaaaatttatattgtggaccagcatttaaagcctgtcccgatcggaaagcctggtgagctatgcatcgctggagccggcttagcaagaggctactttaaaaagccggggcttacggctgaaaaatttattgataatccctttgaaccagggacgaagctatataaatcgggtgattcagcaaggtggcttcctgacggcaacatagaatacttgggacggattgacagccaagtcaaaatacgcggttttcgcgtcgagctgggcgcaatagaaacaaagctgagtgaatttccgggcattttagatcaggccgtagtggtgaagcagctggaaggccatcaacagctcgctgcttattatacagaggaaagcggacatgcctctgccaatccaaaagatttgcgccttcatctaaaatcgagtctgccggaatatatgataccttcacactttatccgcttagatgagcttccattatcgcccagcggaaaagtgaaccgtaaagaattagaaaaacgcgagatcgtgttcaacataaggaaaccaaatcacttgcaattaacggaaatagaggatcaggtgctgcgcatttgggaggaaacgctcaaggtcagcggatttgggccggatgacggatttttcgatgcgggcggcgattcgcttctggctgtagctgtggctgaacgaatcaaaaaagaattcgattgtgagtttcatgttactgagctgtttgagtattccacgatccgtgcaatcagtgaatacattttggagatggaaaactcagatctagccgggacacaaaatgaagatcattatgatatcaaaaaagatagaaaacacctagaacagaagattcctccttattttgacgacagtgttgcgattgtggggatatcttgccagttcccgggtgcgaaaaatcatcatgacttctggaaccacatcaaagaaggcaaagaaagcatacgattcttttctgaagaagagcttcgcgcaaatggagttcccgaagaattgatacagcatcctgactatgtgccggtgcaatctgtgatcgaaggaaaagacttattcgatcccggtttctttcaaatctcgccaaaagatgctgagtatatggaccctcagctccgcctcttattgctgcactcctggaaagcgattgaagatgcaggatatgtggctaaggagattccggcaacaagtgtatatatgtctgcaagcagcaattcatatagaacgttattgccgaaggagacaacagaaggacatgaatcaccggatggctatgtctcatgggttttagcccaaagcggaaccattcccacaatgatctcacataagctcggattaaaagggccaagctattttgttcattctaactgttcttcatcactagtcggtttatatcaggcatacaaaagcctgacatcgggcgaatcacaatatgcgcttgtcggaggcgcaacattgcacgcacaatcagcgatcggctacgtgcaccaaaacgggttgaatttttcaagcgacgggcatgtgaaggcgttcgatgcttcggcggacggaatggccggaggtgaaggcgtagcagtcatcctgctgaaaaaagctgtggatgccgtaaaagacggagaccatatttatgccattatgcgcggaataggcatcaataatgatggggcagagaaggcaggcttctatgcgcctagtgtaaaaggccaaacagaagtgatacagcatgtattggatacaaccaagatccatcctgaaacggtcagttatattgaagcacacggtacgggaacgaaattaggcgatcctattgaaatgtctgcgctaaataaagtgtacaagcaatacaccgacaaaacacaattttgcggaattggttcagtgaaaacgaatatcggccatttggatacagctgcggggttagccggatgcattaaagttgcgatgagtttataccataatgaacttgcaccgaccatcaattgtacggagccgaatccggatataaagtttgaaagctctcctttttatgttgtccgtgaacgaaaatcgttagagaaacacgcaggtgtccatcgggcggctctgagctcattcggccttggcggaactaacgcccatgcaatatttgagcaatatgaaaacatttctgatgcaggtaccgaaaacgaaggcaatcagccttacatcattcctatatcagcaaaaaatagtgaacggctccaagtatacgcgaaggaaatgctgtcctatatcagtcaagacgagcaaaggcatttctctttaagagatattgcatataccttccaagtcggccgtgaagcaatggataacaggatcgtttttatagtgaacgatctggaagagtggaaacatcagctggaagcttttgtgactggaaagccgctcgcagaaggctgtattcaaggagaaaaaacgagaatgacatccgctgaacagctgcttggaaatgctgaagcagatgatatggcttcatcgcggatatcaaaagaagaattgagaaagcttgccgagatgtgggcaaatggctttcacgttgaatggcgcaggctctatccaaatataaagccacgccgcatcagcttgccgacatacccttttgccgaagaacgatactggcctgaaagcagcaccggcgctatcacaacaattgaaccatctcgtttgcatcctttggtgcaccataatacatcggttctgtcagagcagcgtttcagctccattttcacaggacaagagtattttattgccgagcatatcattaaaggcatggcgattttgccggcggcggtcacgcttgaaatggcaagagccgctatagaacaaggaattggcggattggaggatcatgaaactggaatcaggctgaaaaatgtcgtgtgggttcgcccggttgtagcaggaagtgagccggttcaggtaaatatcggactttacgatgaagatggcggacatattgcttatcggatgtatggtgatccggaatacgctgatgcagaaccagttgtatataaccaaggtaaagcggaattgattcagttaaagcgagaaaaagcactggatctttctaagatcaagaaacaatgtgatcaaagcaaaatggatgctgcctcgttttatgaagggatgatcggcgccgattacggtccaggttacaagagtgtagaggccgtatataaaggcgacggccagctgcttgccaaattatcactgccagaatctgttgcacatacgttgggcgattatgttcttcatccaagtgtaatggacggggcgttacaggcggctgaatatttgcaaaatgtcgtcagagcggaactttcagacactgaagactttaaggcagcactgccatttgcactggaggaacttgaggtttttcgtcagtgcgtttctgacatgtgggtttatgttcaattcaactcgaaaaacaaaccgggagatttgatacagaaagtcgatattcacctatgtgatgagcatggcatgatctgtgtgcggctgaaaggattttcgacgagagtgatggaggcagatatacaaaccgaaccatcaaaaatcaacgctgaaactttattgcttcagcccgtttggcaagaacaaaaggctgctaacagcttagctgcaaaaaaatatgcagagcatctcgtattcctatgtgaatatgatcatgagacgagaaaacaaattgaagcagctatcgaggatgtccatgtatacagcctggaagcaaggccttcttcagtagatgggcgtttccattcttatacagaacaagtgtttaaaaaggtacaagagatcattcgtacgaaaccgaaagacggcattctcgttcagatcgtgacctctgccgagggagaacagcaattgttttcagggttgacaggactgctgaaaacagcttgtcaggaaaatgccaaactaaccggccaaatgattgaagtcagcagtgaagaaagtggagaaagcattgctggcaaactgttagaaaatcaaatgagcggcgattcatatgtcaaatatcaaaacgggacacggtatattgctgattggcgtgaaatcaaacaggcaaaaggagacggcagcaaaccgtggaaagacaatggcgtttatctcattacaggaggtgccggcggactaggtcatatttttgcaaaggaaattgcggaacaaacgaaaaatgcgacagtcattctggcgggccgctcacctcttagcgaaagcaaaagcaaaaagctgaaagagcttcatagcaagggggctgacatcacctaccggcaaacagatgttaccaataaaattgaagtctatcagctcattgacgacattcaaaaaagatatggccgtctgaacggtattcttcatagtgccggaatcatcaaggacagctacctggttaataaacaggcaaaagatctgcacgatgtactggcgcctaaagtaaaagggcttgtttatctagacgaagcgagtaaggatttgcctttagacttctttattctcttttcatctctttcaggaagtttagggagcattggtcagtctgactatgcggcagccaatgtatttatggatatgtatgcaggctatcgaaatcggcttgccgacctcagccagcggcatgggcagacgctttctgtaaactggcctttatggagagatggaggcatgcaggtcgatcaagaaactgagaaaaggcttgtgcaacttgccggtattgttcctatgagggcggaaaaaggaattcaggcattatatcaagcacttcattcagaggcaaaccaagtaatggtgatcgaaggcgatgtgcagaaaataaaacaaaacatgctggccaaaaacgcctcagcacctatggaaaagaaggaagcagaacacatgactgaacaaataaatagcattgatgcagacagtttgctggataaagtaaaggcgatgttaaagcgagagatcgccaagctgttaaaggtcaagcttgaaacgattgatgatcatgccgagatgacggtgtatggttttgattctatctccatgactgaattcaccaaccatatcaatcgcgcctatcagttagagctgacgccaaccgtattttttgaccacccgacgattcatgcgtttggcaagcatttgtcagaagaatatcaatcggtatttgcgaagacatttgctgtgcgcgctgtatcggctcagattcagcctgccgcgaaacaggaacaagccgtgcgtgccaaagctaaaagacgcagaaagcagcaagtcatgctgccaaacgccatacagagtgatgctgggcctgagccaattgccattgtgggcataagcgggattttccctatggcgaaagacgttgaggcgtactggaacatcttaaaagagggcaaagactgcatgacggaaatcccgaaagatcgctgggattggcgtgaatatgaaggtgatccggcgaaggaagtcaataaaacgaacgtgaaatggggcggttttattgacggtattgcagattttgatccattattctttggcatttccccgcgtgaagctgaacaaatggaacctcagcagcgcttactgctgacttacgcctggaaagcgatcgaagatgcaggatattcggcgaaaaggttgtcaggcacaaagaccggcgtcttcatcggaacgggaaatacaggatacagctctcttctatctaaagcgaactcggcaatagaaggatcagcggcagccaatacgagcccatcggtcggtccgaaccgggtcagttatttccttaatctgcacgggccgagcgaaccgattgatacagcgtgctcaagttcactagtggcgatccaccatgccatctcttcaattgaggaaggcacttgtgacatggcattagccggcggtgtaaatacgattatccttcctgaggtgtatatcagctttgataaggcgggagcactgagcaaagaaggaaaatgcaagacgttttcaaatcaagccgatggttttgcgcatggggaaggtgccggcatactgttcctgaaaaaattaaaagcggctgaagaagcgggagaccacatttacggagtcataaaaggcagtgcaatcaatcacggcggccgtgcagcctctttaacgactcccaatccgaaggcgcaggcagatgttattcagtcggcatatcaaaaagcgggaatcgatccgaaaaccgtgacctacattgaagcccacggaaccgggacggagcttggagacccggttgaaattaacggtttgaaatcagcttttaaagcattgggtgtaaatgaaggagacacatcagtcaatccttactgcggtttaggttctgtaaagacaaacattggccacttatcgctggcagccggtgcagcaggagttattaaaatattattgcagcttaagcataaaaccttagtgaaaagtctgcattgcgaaaacgtgaatccatacattcagctgaaaaacagtccgttctatatcgtacgggaaacggaagaatggaaagcgctgaaaaatgaacggggagaagagcttcctcgccgggcaggtgtcagttcatttggaatcggcggggtaaacgcccacgtgattatcgaggaatatattccggaagcatccgatgagaatataccatccatcacgccggaacatccgggtatcttcgttttatcggctaaaaataaagcgcggctaaaagaacatgcacagcagctggcagatgcgcttgataagcaatcatatagtgacgtaaatctcgcccgaatcgcttatacactgcaagccggacgggatgcgatggaagaacgtctcggggttatctccggttccattgaggatgtacagcaaaagttaaaagactttgcagcaggcaaaagcggtgtggaggatgtatttaaaggcaggattgataaaggcacactccaaatgctgacagaggacgaagagattcaagaagctgtcgagaaatggatggaacggggaaagtatgcaaaattgcttgaattatgggtaaaggggcttgatgtagactggacgaaattgtatggcgagaatctgccaaagcgcatcagcttgccgacgtatcctttcgcaaaagaccgttattggatctctgatcatattgaaaaaatcggcagcattgatgcaaatcaagcagcctcccgccttggcggagccgtgctgcatccattaatgcatcaaaacacatcgaatctctcggaacaaaggtttagctctatttatacgggagaagagtttttccttgctgatcatgttgtgaaaggccaacggattttgccgggagtggctcatcttgaattggcgcgggcagctgttgagcaggccgcagaggtagaaggtgtaccgtgcaccatgaagctaaagaatgcggtgtgggtgcggcctattgttgtagaggatcagccacagcaagtacacattaggcttttaccgggagaaaatggtgagatctcttatgaaatctatggtcattcagacgttactggcgaacagtcaattgtctacagtcaaggcagcgcggtattgaatcctgctgaaaatctgccggcggttgattttcaatctctgcgggagcagtgtcaggaaagccatttcagcgtaaacgaagtatacgacacctatcgaatgattggatttgaatatggtcctgcttatcgcggagtgaaaaaaatctatacagctgaacaatttgttttggcaaaattgtcattgcatccgtcagctgcagatacgctcagccaatacaaaatgcaccctgggctgatggattctgctttgcaggcgtcaagcattttgacaggcgccggggataaccagctgacactgccttttgctatccaggagcttgaaatcttcggagcatgctcgtcagaaatgtgggtatacgcaagatacagccaaggcagcaaggcaactgataaggtgcaaaagcgcgatattgatattttagatgagagcggcaacgtttgcgtacggatgaaaggattatctttcagagcagcggaaggcggctctggatcggcggaatctgatcaaacgctggcaaccctgatgtttgaagaaaaatgggtgcctaaggattttaaaaaagaaagtcctgagcctcattacgaacggcacattgtcatgctttgcgacatgaatggcctctcaaaagatcgcattgaatcaagattgacaggagcggaatgcatcgttttggagtcattccgcgaaggacttgcagagaggttccaagattatgccgaacaagcgcttgagacggtccagggtcttctcaaaagcagacctcagggcaatgttctgatccagctgcttacctctgcacaaagaaagcagtactcattctcagggctatcggcgctccttaaaaccgccggcctggagaataaaaaactaatcggccagacgattgaaatcgattcacatgaaaatgttgaaagtgtaatagaaaaactgaaagagaataaaaggcacacagaagatcagcacatcaaatatgaaaaaggcaaacggtacatcaatgatctggatgaaatgcaaatagatgatcgggaaataagcatgccgtggagagataaaggtgtatacctcatcacgggcggcgcaggaggacttgggtttatttttgcaaaagagattgctcgtcaagccgaacagcctgtactcattctgacaggcagatccgcgttgaatgcggatcagcaggcggagcttaacgaacttcagcaattaggggctcgcgcagaatacaggcaggttgacgtgacacaaacggaagcagcctccgagcttatcacaagcattacgtctgattacgaagacttgaatggtgtcattcacagcgctgggctgattaaagataactatcttatgagcaaaaccaatgaagagctgacacaagttctcgctcctaaggtgaaagggcttgtgaatgtggatgaggcaaccgagcatcttgcgttagatttctttatcctcttttcttcaatatcaagtgttgccggcagcgcgggacaggccgattatgcaatggctaatgcatttatggacagttatgctgcttatcggaatgcgcttgtaaccgccatgtacaggcacggacaaacgttgtcaatcaattggccgctctggaaagaaggcggcatgcgcgcgaataaagaaattgaaaacatgacgttgaaaaacacaggtgtgactccaatgcggaccgagaccggcattcaagcgctgtataaaggtttggcatttggcaaagatcaagtcatcgtcatggaaggattcaaagacatgatgagggaaaagctgactcaaaagccgtcttctgatgatgtaccaatgaaaacagtgcaagtacgggtgacatctgaagcaagaatggatcaagggaatatgtttgaccacattcaagaagttttaaagcaaacaatctctcaattgctcaaaatcaaacctgaagagattgacccggacatggagtttaatcaatatggatttgattcgattacgttaactgaattcgcaaatacactgaatgagaagtgcaagctggatcttacgcctacggtcttctttgagcacgcaactgtttatgcatttgcagggtatctgtcagaagaatatccaaatgcttttacagctcaaacgcctgccaaagctgaggtgctaatgcagcctgtcgaacagaatataaaaaatatgacgttttcgactgaaaaccgctttgtaaaaccttcggtaacaccaatgcaaaaggaagctgatcacaagcctgagcctattgcgattgttgggatgagcggcgttttcccaaaggcaaaagacgttgaggaatattggaagaacctgtcatcgggcgcagattgtattacagaggttccaaaagaccgctgggattggcaggagtattacggagaccctctgaaagaagcgaataaaacaaacgtcaaatggggcggttttattgatgaagttgctgactttgatccattgttcttcggcatatctccgctggaggctgagcagatggagcctcagcagcgcctgttgatgacctatgcgtggaaggcggtagaagaagcgggacactcagcgagaagcctggcaggaaccaaaacgggcatcttcattgggacaggaaacacagggtacagttcacttctgtcaaatgtagacatcgaaggctcagcggctgcgaatatgagtccttctgcaggaccgaatagagtcagttatttcctgaacattcatggaccgagtgaaccgatcgacactgcgtgctcaagctctttggtcgccattcatcatgcggtttgcgccattgaaaatggaaactgtgaaatggcgattgcgggaggggtcaacacggtcgtaactccgcaaggccatatcgcctatgataaggccggggcgctgagcaaagaaggaagatgcaaaacattttctgacaaagccgatggattcgcagtcagtgaaggtgccggcattctctttctaaaaaagctgacagcggctgaacgagacggtgatcatatttacggtgtcattaaaggaagtgcggtaaaccacggtggccgcgcaaattctctaacgactcctaatccgaaagctcaggcggatgtcgtaaaaacagcatatgaaaaagcgggaattgatccaagaaccgtaacttatattgaagcgcatgggactggaaccaagctgggcgatccagtagaaatcaacggcttaaaagcggcatttaaagagctgtatgaaaaaacgggggacccggctgttcatggcagccattgcggacttggatcagcgaaaacaaacatcggtcacttatcgcttgcggccggtgtggcgggtgtcattaaagtgttattgcagctcaagcataaaacgcttgtcaaaagtctgtacagtgaaactgttaatccatatatcagactggatgacagcccgttttatattgtgcaggaatcgagagagtggcaggcgcttcgggatgaagctggccgagagctgccgcgccgcgcaggcatcagttcgttcggaataggcggcgtcaatgcccacgtggtcattgaggaatatattccgaaagaaacaacccatcctgcaacagcaccagccgtgacagcacagcacccgggcatctttattttgtcggcaaaggatgaagatcgtctgaaagaccaagcccggcaattagcagactttatcagcaagcgatctatcactgctcgtgacctcactgatattgcttatacactccaagaggggcgtgatgcaatggaggagagattagggatcatcgctgtctcgactggggacttgctggaaaaactgaacctctttatagaagggggcaccaatgcgaagtacatgtacagaggcagagcagaaaaaggtatcgcacaaacattgagatcagatgacgaagtacagaaaacgctcaacaatagttgggagcctcacatatatgaaagactgcttgatttatgggtaaaaggcatggaaataggctggagtaaactgtatgacggcaaacagccgaaacgcatcagcctccctacctatccatttgcgaaagaacgctactggataacggatacgaaagaggaggcagccgcccatcaaacagctttaaaaacagtcgaatcagcagctttgcatccattgatacatgtcaacacatctgatttgtcagagcagcgtttcagctcggcctttacaggtgctgagttctttttcgccgatcataaggtgaagggaaaaccggttatgccgggcgtggcatatcttgagatggttcatgctgccgttacaagagcagtgagaagaaccgaagatcaacaatctgttattcacatcaaaaatgttgtgtgggtgcagccgattgtggcggatggccagcctgttcaagtggatatcagtctaaatccccagcaggacggcgagattgcttttaacgtctatacagaggctgcacacaatgatcgaaagatacattgtcaaggcagtgcttcaatccgtggggcaggagacattccagtccaggatatcagcgcgcttcaagaccaatgcagtttaagcacactctcacacgaccagtgttatgaattgtttaaggcgatcggcattgactacggacctggttttcaagggatagatcggctttacatcggccgcaatcaagccttggcagagctttctctgcctgctggtgtaactcacacactgaatgaattcgttcttcatccaagtatggccgactctgctttacaagcgtcgatcgggctaaagctgaattccggtgacgagcagctttctctgccttttgcgctgcaagagctagaaatattcagcccgtgtacaaataaaatgtgggtgtctgtgacatctcgtcctaatgaggacaaaatacagagactggatattgatttgtgtgatgaacaaggccgagtgtgtgtaagaatcaaggggattacctcaaggctgctggaagaaggcatacaaccgccagacgggccgacatcactaggaaactccaaagcaactcttaacggagcgcttcttatggcgccgatatgggatcgagtgcagctggagaagaggagcatttcgcctgctgatgagcgtgttgtcatcctcggaggggatgacaacagcagaaaagctgttcaaagggagtttccgtttgccaaggagctgtacattgagccgaacgcatcaattcatagaattacaggccagcttgaagcactcggatcgtttgaccacatcgtgtggatgtctccttctcgtgtgacagagtgcgaagtcggcgatgaaatgatagaagcccaagatcaaggcgtcattcaaatgtataggctcattaaggcaatgctttctttaggctatggacagaaggagataagctggacggtcgtgacggtgaacacacaatatgttgatcagcatgatattgtcgacccggtcgatgccggggtacacggcctgatcggttcaatgtcaaaagaatatccaaattggcagacaaagctgatcgatgttaaaaaatacgaagatctgccgttatctcaactcctttccttgcctgccgatcaagaagggaatacgtgggcctatcgaaacaagatttggcataagcttcgtctaattccagtacacaacaatcaaccggtgcacacgaagtataagcacggaggtgtttatgttgtcataggcggagctggcggtattggtgaggcgtggagtgaatatatgatcagaacatatcaggcgcagatcgtttggattggcagaaggaaaaaggatgcagccattcaaagcaagctggacagacttgcacgtctagggccagccccgtattacattcaagcagatgcggctaaccgagaggaattagaacgcgcgtatgaaacaatgaaacaaacgcatcatgaaatcaacggcatcatccattctgcgattgtcttacaagaccgaagcctgatgaatatgagtgaggaatgtttcagaaacgttcttgctgcaaaggttgatgtaagcgtgcgaatggcccaagttttccggcatgaaccactggattttgttttgtttttctcttccgtacaatcgtttgcaagagcttccggacaaagcaattacgctgcgggctgcagttttaaggatgcttttgcacagcggctgtctcaagtatggccttgtacagtagccgtgatgaattggagttattggggaagcattggtgttgtttcatcaccggattaccaaaagagaatggctcaggcaggcataggctcaattgaagcccctgaagcaatggaagctttggaattgctgctcgggggaccgctgaagcagctagtaatgatgaaaatggcaaacgaaacgaatgatgaagcggaacagacagaagaaacgattgaagtgtacccggaaactcacggctccgccatgcaaaagctgcgaagctatcacccgggtgacagcacaaagattcaacaactgttataggaggagaagcgccaatgctgaacacagaagacattctctgtaaaatgcttttcgcacaattacagtccatagggtttttcacagaaagtaaatcccagccggtattggagaatttctatggcagatggtttgaagaaagccaatcgattttagaacggcatcaatttctcaagcgaacggagaacggacatgttccaacacgctcaataggcaccatgagcgagctgtggaaagaatggaatgaacaaaaatctgacctgcttcaagacaataatatgaaagccatggtgacattggtggagacagcacttaaagccttgccggagattctgaccggcaaggcgtcagccaccgatatcctgtttccgaattcatctatggatttagtagaaggggtctataaaaacaatcaagtcgcagactattttaatgatgtgcttgcagatacgttaacagcctatctgcaagaacgtctgaagcaagagcctgaggcgaagattcgaatattagaaatcggagctgggaccggcgggacaagcgcggctgtttttcaaaaattgaaagcatggcagacacatataaaagaatattgttatacagatctgtctaaagcttttctaatgcatgcagaaaataagtatggtcctgacaatccatatttgacatataaacggtttaatgtcgaggagccggcgtctgaacagcatattgatgcgggaggctacgacgcggtcatcgcggcaaatgtgcttcatgccacaaaaaatatccggcagacattgcgaaatgcgaaagcagttttgaaaaagaacgggctgctccttttaaatgaaataagtaatcataatatatattcgcatttgacgttcggccttttagagggctggtggctgtatgaggaccctgatctccgcataccgggctgtccgggcctgtatccggatacttggaaaacggtgcttgagagtgaaggatttcgctatgtttcctttatggctgaacaatcgcatcagctcggccagcagatcattgccgctgaaagtaacggagtcgtccgtcaaaagaagagaacgggggcagaagaagatccaagccatatacaaatgaatgctgaaatcgctcattcacaggaaagcgattctctcatcgaacaaacggcacaatttgtgaagcatacgctggcaaaatcaatcaaactatcaccagaacgtattcacgaagatacgacatttgagaagtatggaattgattcaattttacaggtgaatttcattcgtgaattagaaaaagtgacgggagagcttccaaaaaccattttatttgaacataacaacacaaaagaactcgtcgaatatttagtaaaggggcatgaaaataagctccggacagcattgttaaaggaaaaaccgaagcctgcaaaaaatgaagctcctcttcaaacagagcgtacagatcctaataagccatttacttttcatacacgccgctttgttacagagcaggaagtcacggaaactcagctagcaaataccgaaccactaaaaaaagaaaagacaagtaatttgcaaggaacacattttaatgattctagtacagaagatatcgcaataatcggggtaagcgggcgctatccgatgtctaacagtttagaagagctttgggggcatttaatcgccggagacaattgtattacagaggcaccggaatccagatggcgcacatctttattgaaaacattatcaaaagatccaaaaaagccggcaaataagaaacgctatggcggatttttacaagatatagaggcatttgaccatcagctttttgaggtggaggaaaatcgggtgatggaaatgacaccggaactccgtttatgtttagaaaccgtctgggaaacgtttgaggacggcggctatacgcgaacccggctggataaattgcgggatgatgacggagtaggtgtttttatagggaatatgtataaccagtatttttggaatatcccatctttagagcaggcagtcctcagctcaaatgggggagactggcacattgcaaatcgcgtttcccacttttttaacctgaccggaccgagtatcgctgtcagctcagcatgctctagttcattaaacgccatacatcttgcgtgtgaaagcctgaaattgaaaaactgctcaatggcgattgctggaggcgtcaatttaacactcgatctctctaaatatgattctttggagcgtgccaatctgctgggaagcggcaatcaaagcaaaagttttggcacaggaaacgggcttattcccggggaaggcattggagctgtcctgttaaaaccactttcgaaggcgatggaagatcaggatcatatttacgctgtgatcaaaagcagttttgccaaccatagcggcggaagacagatgtatacagctccggacccgaagcagcaagcaaagttaattgtcaagtcgattcagcagtcgggcattgatccagagactatcggctatattgaatcggcggcaaatggttcggcgctgggcgatcctattgaagtaattgccttaacaaacgcgtttcaacaatatacaaacaagaaacagttttgtgcgataggctctgtcaaatccaatctggggcatttagaggcggcttccggcatttctcagctgacaaaagtgctgctgcagatgaagaaagggaccctggtgccgacaattaacgcgctgcctgtcaatccaaatattaagctggagcacacggctttctatcttcaggaacaaacaaagccatggcatcgcttgaatgatcctgaaactggaaaacaattgcctcgcagaagcatgatcaattccttcggagcggggggagcctatgccaatcttattatagaagaatatatggagacggcccctgagaaagaacatatcgctctccgccagcaggaattcactgccgttttttcagccaaaacaaaatggagcctgcttagctatctagaaaatatgcaattgtttttagagaaggaagcttctctggatattgaacccgttgtacaggctttacacaggagaaaccataatttagagcatagggctgcatttacagtgacatcaactcaagagctgatcgaaaaactaaaggtgttccgaacatcaagagaaagctcactccagcaaggcatctatacatcattcgatttacagccatgtccggaatcagcatctaaggatagagaaataaacgcagcagagcaatgggcacaaggggcatcgattgcttttaaagaagctgatatagggaaccgaacaggctgggttcatctgcctcactatgcatttgaccataatacatcatttcatttcgatgtatcgtctatcaatgagaaatcgtcagatgttgaagacaatatcaatcagccggtcattcaagagcaattcacttatgatgagccttacgttcaaggacacgtcttcaacaatgaacgggtgcttgtcggtgccacatatggcagtctggccattgaagcattttttaacctgttccctgaggaaaacagcggccgtatcagcaaattaagttatatcagtccaattgtcatcaaacaaggcgagaccattgaacttcaggcaaagccgctgcaaaaagatcaagtcatagaactgcaaatcatgtatcgcgagccgtcctctggtttgtggaagcctgccgcaatcggacaatgcggaatcggttcttttgagcccaaaaaagtcaatatcgagaacgttaagcattcattaactaagcttcatcacatcgatcagatgtataaaaccggaaacggtcctgaatggggagagttatttaagacaattactcatctctacagagatcacaagtctatactggcaaaaattcgcctgccccaaagcgggctggcaaacgggcaccattacactgtaagcccattgatgacaaacagcgcgtacttggctatcctcagtttcttagagcagtttgacatgacaggcggcttcctgccgtttggaatcaatgatatccagtttacaaagcaaacgataaaaggggattgctggcttttgattacattggttaagaatacaggtgacatgttgctgtttgatgtagatgtgatcaatgagtcgtcagaaacagtgctgcactactcgggctactcgcttaaacagcttcgtatttcgaatcaaagaggaaatgaaaataaggccatcaaagccagcgatctgaaagctcgtatcagaagctatgtaacagataaactggcagtaaacatggccgatccgtcaaaattgtctcttgcaaaagcgcatatcatggattttggaatcgattcttctcaattggttgcactgacaagggagatggaagcagagacaaagatcgaattaaatccgactctgttttttgagtatccgactattcaagagctaatcgacttttttgcggacaaacatgaagcatcttttgctcagctgtttggtgaagctcatcagcaggaagaacgcctagctcaaatcgaaaaccaaatgaaacagattccggcatacgagacgaacacggataaaacaatcgaacacgcggcagacggcatagccattatcggcatgtcgggacagtttccgaaagcaaacagtgtaacggaattttgggataaccttgtccaaggaaagaactgtgtctctgaagtgccgaaagaacgctgggactggcgcaaatatgccgcagccgataaggaagggcaatcaagccttcaatggggcggttttatagaaggaataggtgagtttgatcccctgttttttggcatatcgcctaaagaagcggcgaatatggacccacaggagtttctgctcttgatacatgcatggaaggcgatggaagatgcaggcttaacagggcaggttttatccagccgcccgacaggagtatttgtcgcagccggcaatacggatacagctgtggttccttccctaattccaaaccgtatatcctatgcacttgatgtaaaagggccaagtgaatattatgaagctgcctgttcctcagctctagtggctttgcacagagctatacaatccattcgaaacggcgaatgtgagcaagccattgtcggggctgtgaatttgctgctttcaccaaaaggctttattggcttcgactcaatgggctatttgagtgagaaaggacaggccaaatcctttcaagcagatgcaaatggctttgtcagaagtgaaggagcaggagttctcatcattaaaccattgcaaaaagccattgaagattctgatcatatttattcggttattaaaggttcaggtgtatcgcatggcggcaggggaatgtcacttcacgcgccaaatccggccggcatgaaggatgcaatgctgaaggcttatcaaggagcgcaaattgatcccaaaacggtgacctatatagaagcgcatgggatcgcctctccattggcagacgcgatagaaatagaggcgttaaagtcaggctgcagtcagctcgaattggaacttccacaggaagtacgggaggaagcgccatgttatatcagcagcttaaagccgagcatcggacacggtgaactcgtctcaggcatggctgctcttatgaaggtcagcatggcgatgaagcatcaaacaataccaggcatatccggattttcgtctttgaatgaccaggtgtcattaaagggcacccgtttccgagtgactgccgagaatcagcaatggagggatttaagtgacgatgcaggcaaaaaaattccgcgcagagcgagtatcaacagctatagctttggaggcgtaaatgcgcacgtcattttagaagaatatattcctttaccaaaaccaccggttagtatgagtgagaatggtgcccacattgtagttctttctgcaaagaatcaagacaggctaaaagcaattgttcaacagcagcttgactatctgaataaacaacaagaactgtcattacaagattatgcttatacactccaaaccggccgagaggaaatggaagaccgcctggcgctcgtcgtccgcagtaaagaagaactggtaatcggcttgcaagcctgcttagctgcggaaaaaggcgataagccgaagagttctgtacctgtctttagcggaaatgcagaaaatggctcgtcagatctcgaagccttgctggatggtccattaagagaaatggtgatcgagactttgttgtctgaaaacaaccttgaaaagatcgcgttttgctggacaaaaggggtgcaaatcccatgggagaagctttatcaaggaaaaggtgcccgcagaataccgttgccaacctatccatttgaaaagagaagctgctggaacggctttcaagcagtagagaatacgccttctgtttcacaggatgagcgtatcaacaacagcagcgatcatcacatattagcaaatgtactagggatggttccgggtgaactgcagcctcataagccattgcagcagtatggatttgattcaatttcttgcatacagttattacagcaattgcaatcaaaggtggaccctctcattgccttgacggagcttcaagcatgccatactgttcaggacatgatggacttgatcgcaaagaaaaaggaggatacatccttacaaaatgatcaagctcgcacgtttccggaattaataccgttaaatgacggcaagcgggggcgccctgtcttttggttccatggcggagtaggaggagttgaaatctatcagcaatttgcacaaaagagccagcgccctttttacggcattcaagccagaggattcatgactgattatgctcctttgcacggaattgaacaaatggcttcctattatatagagatcattcgatccatacagcctgaaggtccttatgatgtaggcggatattccttaggcgggatgattgcatatgaagtcacacgccagctgcaaagccaaggccttgctgtcaaaagcatggtgatgattgactccccatatcgttctgagacaaaagagaatgaggcatctatgaaaacgtcaatgctgcaaacaattaatacgatgctggcatcgattgcgaaacgggaaaagcttacggatgttctcatcagccgtgaagaggtggacataagcttagaggatgaagaattcctggctgagttgattgacttggcaaaagaacgagggctaaacaaaccagataagcaaatacgtgcgcaggctcagcaaatgatgaaaacacagcgcgcctatgatttggagtcgtacactgttaagcctctccctgatcctgagacggtaaaatgttattatttccgcaacaaaagcaggtctttctttggtgatttagacacttatttcactttatcaaatgaaaaagaaccgtttgatcaagctgcctattgggaggaatgggagcggcaaattcctcatttccacctggtggatgtcgattcaagcaaccacttcatgatattaaccgaaccgaaagcgtcaacagccatgttagaattttgcgaaaagctctattcaaacaggggagtagtgaatgcgaatttccttaaggctttccggaagaaacatgaagcgagggaagaaaaagaaacagatgaattggtgaagcgctgagaaaacacaaacgccccctcttttaaaagggggcgttttgaatgttattttgaaagtgaaacagggagactttctaatcctcttaaaaagacattttttctccattgaatgtcatcaggtgcaaccgcaagttcaatatcaggaaatctcttcaaaagtgcgttaaatgcaatgtggccttccagcctggcaagaggcgctcctaagcagaaatgaatgccaaaaccgaaagaaatatgtctgttaggcgaccggtttatatttaatatttcggggttctcaaaaaaattcgggtcgcgattggcagatccgatccctataaaaatcatgtctcctcttttgatcgaatgccccttatatgtaaagtcttcgatggcccaccgatttgccatcataacgacaggtgaggtgtatcgcagcaattcttcaaccgctgtagcgatcatttcaggctgctgcttgagcttctcacattccttcttgtgctgcagcaatgcgagggtgcctgagccgagtaagttaacagttgtttcaaggccggctacaacgagcaagaacagcatcgaatagagctctttttcgcttaacttgctgccgttttcctcagcatgcacaagtttgctgattaaatcgtcttttggctttattcttctgtcatggatcagcttggcgatataatctttaaattcacgaagagcctgatttgtcagctctctattaccttcagaggtatcaaccatcgcattggtccagatttgaaactgtgaccgatcttcttttgggattcccatcaattcagatataacaataaaaggcaaaggggaagcgaaggatttcatgatatccgctttattttctttttccatttcatctaaaagctgttcagcaatttgttcaatgctgccgcgcagattttcaatggttcggggagtaaatgcttgatgaacaagtgatctcaggcgggtatggtcaggtgtgtcttttgccagcatatgatcggatacaaaatcgatatcttcactaacgttgagcattttgatttgttcttggttcatcacattttttacgtctcttgtaattcgattgtcttttaaaaaggccatacaatcatcgtatcgggtaattaaccaggccggatatgtggctccgaaccgttttaattcaaatcggtgaatgggctcttcctctctaaatcgtcctaaaactgaaaaaggattgtgatgaaactctttaccatgcggatgaaacatcaatttttccatttgcattctcctcgcctaatagggtaaatagatgaatcaaattgctgaattagtttacaaaaaacagaatgatttgaaatgtaatcctgtctctaaaactatatatctatcttaggcgtcattcaatagggagaagaacgaaaaaagtgaaaaaacggctcgatataaagcagcgcctttgaacgaaagctcaaaggcgctacgctgtattattttgatgaaagtggctgtcagctgtgctggatatcaattgtatatactgcacgatctgttacgaccttcaatccttcgttttcttggtgaatatgaagctcacctaataaaggaatctcataggcattttgcggaagcggtacgtttccgtcctcagtgaatgttgttccttcgccttctaaaacaagctcttctttcgcaacataatcatcaggatgattcgtactgcgtatagccactttttgaaggtggagaacaatctgatccaagtctgatatctcttcatcatgggtcaattcaccttttctaatatcaagcgtctggccgacttttgattccagccattgagaaagctgtgtattcgtgtgtgccatcaatattcctccttttgatctacacgatactattcccaattgctgcatcttttacacgggaaagagccgccccactctttatgtatgaaacagttcgctgttgagtgccttgatatagcgtacggcagaacgctggaccgattcgtcggcattttctttgacaactttagagaaagcattgtaaagccggttgaattgaagcggttttactttggctgctatttcttcaactttggaggcgggaaggggaatgagatttgggtagctgtacataaagctgacccagtttcgatccgccgcaaccgtaatgatatctccggtcaatagacagcctttcccttcattgcccttgctccaatgcaaaacagcaccgcctttaaaatgtccgcccagtcggtaaaggtccagtcccggcttcatattgagcgtttcccctgaccagaagtgaatgtgattgcttggccttgtcacccattctttatcatcctcatggatatagatcggcgcctgaaacgcttcagcccactcaacctgagtagagtaataatgtggatgagacaaggcgatggcttgaataccgcctaattcgttgatttggtcaattgtcttttggtcaagatatgtcatgcaatcccacagcacattgaagcccttatgctggataagatgggctgtttgtccgatcgcaaactctggttcagttttgatgctgtaaagatgctcttcttcctttttaaggatgttttgaaggtttcctttctcacgcatgtcttcaagggttgtccaagtttgtccatcgggatgaatatactgtctttcatcctcgcaaatcagacacgagttgggcggatctactgtctgtgcatgttgcacaccgcatgtgttgcagatataataaggcactttcttcacttccttcatctattttccattattttaccttatgattatgaatattcaaacaaaaggccggcagttctgctgagagagaattgccggcttttgatgatgtttattggccgggaacggaattttctgcgttgacagcgcccgctccgtagatattcggatcttcatctttccatttgtccgtgccgtttttcaaaagctcttttacttcatcaggggtaagatccgggttttgctgaagaattaaagctgcgattcctgcgcaaatcggtgttgccatcgaggttcctgacattgtaaagtactgagaccctacacggcttgacttttggagcttatcaatataagaattcggagagcgaagggaaataatattaacacccggcgctaaaatatcaggcttttctttcccatatactgtcgggccgcggcttgagaaggaagcgacagtatcatcatcgctgcttgcagtattgttatcgtcaagcgcacctactgtaatcaccttttcgctcacgcccgggcttgcaatggtctgcgaatcagggcctgagtttccggcagcgacacagacgacaatccctgcgctccacgcttcctcaaccgctctgactaacggatcttcctgttcatgatcatatctaagggcatcgcccccgagcgacatgctaataatatcaatcggttcatcggggttgtcctcattgtattgaatacaccactcaacaccctctataatatctgctaacgttcctgaaccctgcttgtttaatacctttacgccaatgagattggcttccggtgcagggccgcggtattgaccggaagaggatgcgccgctgcttgcgacatcacctgcacagtgtgtgccatgaccattatcatcgtacggctctgttttttgattgaccatgtccgcgaatccgataattctgccttctagatcaggatgcgggtagattcctgtatcgacaacagcgacagtaacaccttttcctgtcagggtttgaccgtttctgacgacttccttcgcatggcttgcttcggttgccgtgtctaaaagcgctttgacttcgcggtttaaatacactttacggatattgctgcattcagagagaagggaatgtaatgctgaaggagtaacttcggcgctgcagcagttgattttgttgaagcggctttttagcttgctgcgtttttctttttgcagcacctctccagctatttgaaggccggtctcgtgacagccttcctcaaattcgataatgactgacattttttttctgttttgcaatttggtttcgaaaaatttatgcaagaagcaaggagtccatttgaagggcttgtaaagctgcaatacggtttcccgtaacggccaatctagcttgtgagcatttgctctcaccatttgtaccatagagtacccaaacatgtattttcctcctattataaggttctctgtatactctatgaacagatgataggtttggtaagtttgtttgtcctctgtaagagacagacaagagtttgtttttctgaatctttcgcattagatacgatagattcagaagctgaggaaatcattggggattgaaaaagaacgtttgttcgtattataatgtgatcatatcaaactgggaaggggagagcaaccgtatgaatttctacttgcaccgatctttggaaagccaaatgccaatcagcattatatatatgaagaaagacggaacgattagtaaaagaacgattattgtgagacagaaaagcaaaacgaaaatcaaagcattttgtttttcgaaacaacaaatcagaacatttttattggactctatcctctcctgtgactttgtgagaacaaataagcaaaatctctattctgcaggccggtaacagctgtccgtctcagcaaccgggcagcctgttactaaaaccctccttaaacctatatacatttatttgccaagtgaggttgttcctaccttttttgtctttcctctcaaccttttttcactcttatttgaaatgaaccgctaataaccgtgacaatcaattgattttttgaaaccgggaactttttcactgatgatattgtgtatacaatggtaagataaaacctattggctaaacctcatataatgaaccgcgccattcttatgaaaggagttaaacatgagaagatttttactaaatgtcatattagtcttagccattgtcttgttcttgagatatgttcattactcattggaaccagaaccatcaaatcagccagatacatattcaaatttcagcagcttggcagagaatgagagcccagccgattacgatatttcatataatgagaaaaaaggaagcaaagtcttaattatgtctccgcatggcggaagaattgaaggcggagtaagtgagcttgtgcgttatttcaataatgaatactctacatacctatttgaagggttgaagtcccatgataaccaaacactgcacattacaagcaccaactttgatgagccattggcaaaaaagaaaatcaaggagcatcaatatgtggtggcttttcacggatataaaggagagaacaagaatacccttgtagggggaacagaccgaaagcgggcgaaaatgattgtgagagcccttgagcggagagggttttccgctgagttagcgtcgtctaaaagcggtcttgctggattgaatgccgaaaacattaataaccaaggggaaacggggctaagtatccagctggaaatcagccgtgagcagagagaagcattttttgatgatttttattataaaaatagaaaatacacaaagaacagtgaattttatgcttatgtcagtgcgatcaaaggtgtcctggaaaaagagtattcgtaacaagcagatcagaagacaaaataagagaagatcagtagactgaaataggataaaaaaggaggcaaaacaatggcagatcatcatttttatttaaaagcgaactggccgggtaaccgtaatgatgtcggtacgatcgaaagcggaaacctgatcacatcgatttccattcctaaagaaatggatggcccgggagaagggaccaacccagatgaaatgcttctcggggcggcagcgacctgttacattattacacttgcagcgatgatggagagaagcgggctggaaaaagaagacttacagatggagtcagaaggcattgtcaacgttacaaaaggagtctttacatacaaaaagatcattcaccgtccctctgtcgtgcttaaacatgatgcttcacaagacgacgtcgcattggcgcacaaactttgtaaaaaagcggagtcgtcatgcatgatttcgcgtgcaattcaaggaaatgtcgagctgcagcttgaagcctctgtgaaactgggttgagaataaagaaaacagacggtcactcacaggccgtctgttttttatcttcagcgtgggctttcgattgatttagcacgaccacgcctgcaatgacaagcgtgagaccgaatacaccttttaaactgatggtttcgccaaaaagcaaaaacccgacaattgctgtaagcgcggtaccaacgcccgaccatgttgcatacgcgcttgataagtcaattgtttttaaagaaaagcttagaaacgtaaaagcagaaagaaatccgactatgactccggcaatgggccaggcttgtgtaaatccttctgaaagcttcaacatcgtgctcccaaacacttcagatacaatggcgagagccaaataaagcaatcctctcatcttcatcactcctttacggccaattaagtaacacgacccctgatagtaataaaagaatcccgataagccctttggcattcagatcttccttgaaccattttactccgatcactgtcgtcagcaccgtgcctgccccgctccaagtcgcataggagaggctcaggggaatatggtttaaagtcagggacagcatataaaaggcgagggaatagccaataacgaccaaagcacttggcttccactttttgaagccatcagatactttcagcatggctgctcctatcgattccgaacatatggcaatcgtgaggaatatatatcctatcaacatcatgaattctcctcactatatttttagattagaaaaaaacttcagctagaaaaatattagtgtatgcctatgtatgagtcaagagattcattttcacacacttaaaaagacccctttttaaggggccttttgcgtttaataataataagggaacggggcatacggataataggggtatccgccatacaaataaggattaaataaagcgcttcctataagcccgcctgcaaggccgccgataaacggtcctccaaaaaatccgaatggccggccaaacccataaccaaatccgggtcttccaaatccgtaaccgaacccgaacggtcttccaaacccaaatggtctcccgaatccgaacggtcttccaaatattcttgtatcttcagggctgaaatgctctaactcgttcatgttttctttcctcctgtaataaagtgtagatgatgcagtgtattcaccctgcccggatttgattgggcgaatcgaggaaaaggaggatgtgaacacattgggcctgtatcagtctgactggtcaaaagcaccgccccacgcacatgcctatcatgtcaaaacaacgagagaacagggccattatcatctcattgaagggtttactcagccggcaaacggatcaaataccgatcagcatacacattactatacagggatcacttcatttgaaaacggccattttcatcggtattacggaatctcagggccggcgattcccttagcagatggcacacattatcatgaaatcgaagaaacgacatatctggcctataacgagccaattgagatccagtacggaggggttgtgtacgatcccggagatgacagaagaaaaacgcatcgtcataccctgaaaggaaagacaagggaaattgtcggcaatgagccgctcggctggtagaaggatgtttaccgatgcaaaaaaagggcaaaatggataggtggttgtccatgttgaatgctataatgggggggagatttataaaagagagtgatacatattgaataatacgaagcagcccgttgtcattttagtcggaccgacggcagtggggaaaaccaatttaagtattcaactagccaaatccttaaacgcggaaattatcagcggagattcgatgcagatttataaagggatggatattggaacagctaaaattaccgaacaggagatggagggagtgccccatcatctgattgacattttagatcccaaagactctttctctactgccgattatcaaagcttagtaagaaataaaatcagcgagattgcaaatagaggaaagcttccgatgattgtcggcggtacagggctttatatacaatctgtgctttacgattatacatttacggaagaggcaaatgatcccgtgtttcgagagagcatgcaaatggccgctgagcgggaaggcgctgactttctgcatgccaaacttgctgcagcagatcccgaggcagcagctgcgattcatccgaataatacaagaagagtcattcgcgcactggaaattttacatacgtccggaaaaacgatgtcccagcatttgaaggaacaaaaacgagaacttctgtacaatgcagtgttaattggcttgacaatggatagagacacgctttacgaaagaattaatcagcgggtcgatttgatgatggagtcaggccttcttccggaagtgaaacgcttatacgacaagaacgtgagagactgtcaatcaatacaggcgataggctataaagagctgtatgcatattttgacggttttgtgacactttccgatgctgtcgaacagctaaagcagaactcgaggcggtatgcgaaacgccagctgacgtggtttcgcaacaaaatgcaggtcacatggttcgatatgacaccgcctgttgatatggagctgaaaaaaaaggaaattttcacacatatagcaggaaaactcgaactttaatcgaaactgtatgatatagagaatcaaggaggacgaaacatgaaaccgattaatattcaggatcagtttttgaatcaaatccggaaagaaaatacgtatgtcactgtttttttgctgaacggctttcagttgcggggccaggtgaaaggctttgataactttaccgtattgttggaatcggaaggtaagcagcagcttatatataaacatgcgatctcaacgtttgcgccgcaaaaaaacgtccagcttgaactcgaatagatcaaaaaatgccatgtcaagacatgaggaaaggctgccgggggttcccggcggccatttttaacatgaatccacttttgctccaagctttttgtgtaagctgaccatgccaaggcacggtctttttttatgagaacaacatacggaagtgaaaatggtatattatgtataaaatgaatttgggagtgatcgaccttgtttgaaagtgaagcagaactgagacgaatcaggattgcacttgtatggatagctgtctttttactgttcggggcgtgcgggaatcaagataccattattgaaacagacagcggcaattcagactatgaaacgcctcagcccacctcgtttccacttgaacataaccattttggcgttatggaggacggctatatcaaaatttatgagtataatgagtcccgcaatgaggtaaagctgaagaaagaatacgcggatgatgagcttgaataaaattcacaagcattcgaatttacaaagcggattccagccgctaaactaaatacagacacagatcaaacagagggtgaaaacatgaagcataaagtgatcgtgaatcattgggaagaaatttgcgaagatgattcttgctatgaatacggaacaagtatcattgtgaacggaaaagaattaatcagagaagcgtcaattatcactgctttgaaggcggttttagaagagatcggcgcggatgttgaaatagaagaaacagtagagagcgaaaaatgctgtgatagcttaagaaaaaaaaatctagactactaagcagttttttttcatgttatgataaacatcggctaaaaaacgacaccccgagtaggatgagagatgattctcgttctgctctcttttttgggccctaatgagtctgcccatttgcctgatttgatcaaaatatgaatttttcataaaaacgaatctatatattgtgtttttgctagagggtagtatactgtatatagtgttagtgatgagagattcatattttttgataggtcgtgataaaacgtggtacaaatcatatttgattcgaaaacagggaatgttcagcggtttgtgaataaaacaggctttcagcagatacgcaaggtggacgaaatggaccacgtggacactccgtttgttttggtcacctacacgacaaacttcggccaggtaccggcatcaacacaatcatttctcgaaaaatacgcccatctcttattaggagtcgctgcgagcggcaacaaagtatggggcgataactttgcaaaaagcgccgataccatttcaagacaatatcaggtgccgatcttgcacaaatttgaactcagcggcacatctaaagacgttgaattgtttactcaggaggtagaaagagttgtcacaaaatcaagtgccaaaatggatccagttaaataacgaaatcatgatccaaaaagatggaaaattccagtttgataaggataaagaggctgtacatagctattttgtagattatatcaatcaaaacacagtcttctttcacgatttaaaagagaagctggattatttggttgaaaaccaatactacgaagaggaattcttaagcctttattcttttgaagacattaaagaagtgtttaagacagcttacgctaagaagtttcgttttccttccttcatgagtgcgtttaaattctataatgactatgctttgaaaacgaatgacaagaaaaaaatcctcgagcgttatgaggaccggatctcaattgttgcgctgttcttcgctaacggcgacactgagaaagcaaaagaatatgtaaacctgatgatcaatcaagaatatcagccgagcacaccgacatttctgaacgccggcagaaaacgccgcggtgaacttgtgagctgcttcttgctggaagtcaatgattccttaaatgacatttcaagagcgatcgatatctccatgcagctttctaagcttggcggcggggtttctcttaacctgtccaagcttcgcgcgaaaggtgaagccattaaagatgttgaaaatgctacaaaaggcgttgtaggcgtcatgaagcttcttgataacgcgttccgttatgctgaccaaatgggacaaagacaaggctctggcgcggcgtacttaaatattttccaccgcgatatcaatgattttctcgatacgaaaaagatttcagcggatgaagatgtgcgcgtcaaaacgctttcgatcggtgttgtcattccggataagttcgttgagcttgcacgcgaggacaaagcggcttatgtattctatccgcacacgatttataaagagtacggccagcacatggatgagatggacatgaacgaaatgtacgacaaatttgtcgacaaccctcgggtgaaaaaggaaaaaatcaacccgcggaaattgcttgaaaaactggcgatgcttcgttctgaatcaggctatccatacatcatgttccaagataacgtgaataaagtgcatgcgaataaccatatttccaaggtgaaattttctaacctttgctctgaagtgctgcaggcatctcaagtttcttcatacacagactatgatgaagaagatgaaatcggtctggatatttcctgcaacctgggttcgcttaacattctcaatgtcatggagcataaatcaatcgaaaagacagtcaagcttgcgacagactctttaacacacgtgtctgaaacaactgacatccgtaatgcgcctgctgtaagacgggcaaacaaagcgatgaaatcaatcggcctcggtgctatgaaccttcacggctaccttgcgcaaaacggcattgcgtatgaaagtccggaagcgcgtgactttgcaaacacgttctttatgatggtgaacttctactccatccagcgttctgcggaaatcgcaaaagagaagggtgaaacgtttgatcaatatgaaggctcaacctatgcgacaggtgaatactttgacaaatacgtttctactgatttctcaccgaaatatgaaaaaatcgctaatctgtttgagggtatgcatatcccgacgacagaggactggaaaaagctaaaagcatttgtggctgaacacggtatgtatcacagctacagattatgcattgcgccgacaggctctatctcatacgtccaatcaagtacggcgtctgttatgccgattatggaacgcattgaagaacgaacatacggcaactcaaaaacgtactacccaatgcctgggcttgcatctaataactggttcttctataaagaagcctacgatatggacatgttcaaggttgtggatatgatcgccactatccagcagcacattgatcagggaatcagctttacattgttcttaaaagacacaatgacgacccgtgatttaaaccgaatcgatctgtatgcacatcatagaggtattaaaaccatttactatgcaagaacgaaagatactgggcaagacagctgcctttcttgtgttgtttgattaaaggagagtttatagtgacaaaaatttatgacgcagcaaactggtcaaagcatgaagacgattttacccaaatgttctataaccaaaacgtgaaacagttctggcttccggaagagattgctttaaacggcgatctcctcacatggaagtacctcggaaaaaatgagcaggacacttatatgaaggtactggccggacttacgcttcttgacacagagcaggggaatacggggatgccgatcgtggctgaacacgtagacggccaccagcggaaagcggtgctgaactttatggcgatgatggagaacgctgtccatgcgaagtcgtactctaatattttcatgacccttgcaccgactgaaacgattaatgaagtatttgaatgggttaaacaaaataaatatttgcagaaaaaagcgcaaatgattgtcgggctttacaaagccattcaaaaagatgatgaaatttcactgttcaaagcgatggttgcttccgtctatctggaaagtttccttttctacagcggtttctattatccgttatatttctacggacaaggaaaactgatgcaaagcggtgagatcattaacctgatccttcgtgacgaagcgattcacggcgtgtatgtcggtctccttgctcaggaaatttataataaacagacagaagagaaaaaagcagagcttcgtgaatttgcgatcgaccttctgaatcagttatatgaaaatgagcttgagtatacagaggacttgtacgatcaagtcggactctcacacgatgtaaagaaattcatccgctataatgcgaataaagcgctgatgaatcttggatttgatccatacttcgaagaggaagatattaatccgatcgttttaaacggattaaacacaaaaacaaaatcacatgacttcttctctatgaaggggaatggttataaaaaagcgacagttgagccgctcaaagatgatgacttttattttgaagatgaaaaagagcagatataatatctgctcttttcggcttgaaggttcaaatgaggaggacgcagtacccatgggaaaaatggacgaaatgattttagttgccccacgcgatgatgtgtttaaaaaagaaagcttaaccttccagggcgtgtacagtgaagatagcagagtagccgaaatcatggctcagattgaagcggcctatcgtgaaatgagaagaggggacgcagaagaagatccgcgtttcaagcagccgataccttatgtcgtcattaagcgtgaagatgaagtttttctttacgagcggctggctggcggcggtgaatcacgactgcacaacaagctttctctcggctttggcggtcatatgaacgccatcgaaggggcagcttcatttgctgaagtcttaaagctgaacacagaccgtgagcttgaggaagaactgcaaataaatgaagaagataaacaggcgattgtcacactgggattgatcaatgatgatgaaaatagtgttggcaaagtgcatatcggtattctttctgcgcttcaattaaagcctggcgcacaagtggaagtgaaggagaaagaacaaattgcgggtaaatggatgaaagtttctgaattaaaacaggatgacatctacaaccgtctggaaacatggtcacagtttgttgttgatattcttgaataaaaaaacccggtttctcgcgatgaggagccgggtttttttatgagacgctcgtccccgtctcggctatgattctaggatcacaatagcgtcaaagccggcatttttcgctctggcagcgagagtgtctgcattgtcattggatgaaaatgcgccaatctgcactttgtaaaatccgtcctttaaaaggacaatcgagtcaaaacctttggcttcggcattacttgcgagcgagtcggcattcgctttggctttaaatgcgccgatttgaaccttatataaccctgagctggaagtctttttaaggttaaaggcttgctccagcccgtttgcatgtcctctcgctaagctttgaataaaactgctcgttttcagcttatttgcatcggaaacggtatcaatgaagccgttctcggtcaagagggcaggcattgccgactcccttaggacgtggaagttcgctgtttttttgccgcgatcggcaaagtcgacagcttgtatcacttcagagtgaattgccgattgataagtcgtcgtcggggctcctacatctggataaatatagctttcaaaacctgtgcctcccccggaattaacgtgaatggacaaaaagaaatctgctccccagttatttgcggcatttgtccggtcgtttaagctgacatattggtcgcttgtccggctcagcagcagagaaacgccttcatattcattagttaatatcgtacgtaaggctaaagcgatttgcagggttaacgttttttcctgaaggccattacctgttgcgcctggatcagacccgccatggccaggatcaataaaaattttaaccatttttcatcacctcattacaggatatgaaaaaacacagcttctgcttgtacgattatcattcaactgaaaaatgaggaaataaccctttcacatccagaaattatttctcgggaaagcgcacaattcaacatgaagcgacaacagatacggtccgacatgaaatctgtgcatacgccatatgtttgtatgtactttgagttcggttaacctgcactgattcctgttggttttaagctttgcgttcatattaaatcaagcatttgaaacgtaaattgatgagaaaagctcctttcattaaagacaccactttataaatcgaaaaaaagaaaaacacttcaggtatcttagggcgggtaatacgcttcgtacaaaaaacagcccgttgcatgaaaaaaggattggcgaatggagaaaataatgagaaagaagctcactataatactttgacaaaatgattaaaaacaaaatctcatggtttgtccaccccatgtccgtgaatacaataagaaataaagtatttctcgggaaagcgcaggattccttattgttcccgaaaaaagcaattgtttcgacacatgataggcgtttgtcacaatcggcatccgcttgaatatcatatagagagaacagagaggtgaagatgttggagcgcgctgtgacttataaaaacaacggacagatcaacattattctgaacgggcaaaagcaggtgctgacgaatgctgaggcagaggcggaatatcaggctgcattgcaaaaaaacgaagcaaagcacggcattttgaaggaaatcgaaaaagagatgagcgcattagttgggatggaggaaatgaaacgcaacatcaaggaaatatacgcctggatttttgtgaaccaaaaacgcgcggagcaaggcttgaaggttggaaagcaagcgctgcacatgatgtttaaaggaaatccgggaacgggaaaaacgacggttgcacggctcatcggcaagctgttctttgaaatgaatgtcctgtcaaaaggccacttaatagaagcggagcgggctgacctggtcggggagtatatcggacacaccgcccaaaagacgagagatttaatcaaaaagtcattaggtggcattttgtttatagacgaagcctactcgctggcaagaggcggcgaaaaggactttgggaaagaagcgatcgacacacttgtaaagcatatggaagacaaacagcatgagtttattttgatactcgctggatattcacgggaaatggatcattttctctcgttaaatcccggtctccattcaagatttcccatctccattgattttccggattactctgtgacccagctcatggagattgcgaaacgaatgatcgatgaaagggaataccagctcagtcaagaagcggaatggaaattgaaagattacttaatgacagtgaaaagcacgacaagccccattaaattcagcaatggacgttttgtcagaaatgtgatcgaaaaatcgatcagagcacaagccatgaggcttttaatgggagaccaatacttaaaaagcgacttgatgaccatcaaaagccaagatctttccattaaagaagaagcatctggatctgcatagacctctcagtttttgagaggtctgttttttgctcgtatttccgcttttcaaagcaatcgatttgtggtatacacatgcagggtttggtatgataatactactgcccaatatgcaaaagaaaggaacatccatttgaacgaacaagaaacgattcaggagaaagccattttagtcggatgtcagctgccgcatatcacggatgagcattttgaaaattctatggaagagctagcatctctgacgaaaacagcagacggaaaagtactgaccagcgtcacacaaaaacggaacagggctgacgccgctacatatataggaaaagggaaggtagaagagctgaaggcactggtggaagagcttgaagctgatctcctcatctttaatgatgaactgtcgccaagtcagctgaagtcattggcaacagcaattgaagtgaagatgattgaccgcacgcaattgatattagatatttttgcaaagcgggcgagaacgagagaaggcaaacttcaaattgagctggctcagctgcaatatgcactgccgcgtctgacgggacaagggatcaacctttcccggcaaggcggaggaattggggcaagaggtcccggggaaacgaaactggaaaccgaccgccgccatatcagaaatcgcattcatgaaatcaacacacagctttccactgtcattcgccatagaagccgataccgtgaaagaagaaagaaaaacggtgtgcttcaaattgcgcttgtcggctatacaaacgcagggaaatcaacatggttcaaccgcctgacgagtgctgacagctatgaagaagacctcctgtttgccacgctcgatccaatgaccagaaaaatggtcctgccaagcggctacagtgttcttctttcagatacagtaggatttattcaggatcttccgacgacattgattgctgcattccgctcaacgcttgaggaagtaaaagaagcggatttgatcctgcatttaattgattcttcaaatgaggattatgcgggacatgaaaaaacagtgcttgggcttctcgaggagcttgaagcagatgatatcccgatgctgacggcttacaataaacgtgatcaaaaactgcctgattttataccgtccgccggaagggatcacattatggtcagtgcgaaatttgaggacgacgctgcagcctttaaagaagcgattcagcgctatttgcgccaagaactgttaacgtcttttgaagcacatgtgccggcaagtgaagggaagctcctttccagaatcaaatcggaaacgatgatagaccgcttctattttaatgaagaaaatgaacagtatgacatatccggctatgtccaagaagagcaaagtatcatcggtgaattaaagaagtatatgtaggaaggaaaaataaagacatgtttgacacattaacacacggagaattattgaagaaaacggcaatggaagtggaagcggacattgccggcattcataaacaaatagaagaaatcagcgagcgaaatgagtggagagtgcttcaaagctatagaaaacacaaagtaagcgacactcatttcacgccgtctactggatacggctatgatgatatcggaagagacacgcttgaaagcatatatgcggatgtgtttggcggagaagcggggcttgtaaggccgcaaatcatttcaggcacacatgccatctcaattgctttgttcggtgtcctcagaccgggggacgagctcctttatatcacgggcaagccgtatgatacgctagaggaaattgtgggcgtcaggggtggagaaaacgctggttcgttaaaggattttcaaatcggctataatgcggttgatctgacgaaagacggaaagatagactatgatgcagtcgccgctgcgatcaatccgaagacaaaagtaatcggcattcagcgctcaaaaggatatgcgaatcgcccttctttcttaattagtgaaataaaagaaatgatccgttttgtaaaagaaatcaatgaaaatctgatcgtctttgtggacaactgttacggagaatttgtggaagagcttgagccttgccatgtcggagccgacctgatggcgggatctctcattaaaaatcccggcggcggccttgcgaaaacaggcggctacctcgtcggaaaagcgaaatggattgaagcttgctcataccgtatgacgtcacccggcatcggcagagaagcgggggcatctctttactcgctccaagaaatgtaccaaggcttctttttggcgcctcatgttgtgtctcaaagtctaaagggagcggtgtttacagcgagattccttgaaaaactcggcttcacttcaaacccgaaatgggatgcgaaaagaacggatttaatacaatccgttgagttttctgacagagaaaagatgattgctttttgccaggctattcaatttgcatcgccaatcaatgctcatgtgacgccttatccagcctacatgcctggatacgaggatgatgtcattatggcagcaggcacgtttattcaaggagcaagcatcgaattatcagctgatggccctatccgcccgccgtatgtagcgtatgttcagggaggattaacctattcgcatgtgaagaatgccatatgcagtgcagtggattcattgatggaaaagcaattaatttaaatttttaaaaatttctctggatttgatgttaagaatccttacatcgtattgacacataatataacatcacctataatgaaactaagttaagaaaaggaggaaattgagatgagtgataatattcgccgctcaatgcctttatttccaataggaattgtcatgcagttaactgagttatcagcaagacaaattcgatattatgaggaaaatggactgatatttccagccagaagtgaagggaatagacgattattttcatttcatgatgtagataaactgttagaaatcaagcacctgatagaacaaggtgtaaacatggcaggaattaaacaaattctggcgaaagccgaagccgagccagcacaaaaacaaaacgagaagacgaaaaaaccaatgaaacatgatctgtccgatgacgaactgagacagctcctgaaaaacgagctcatgcaagccggccgttttcaaagagggaatacattccgtcaaggcgacatgtcccgcttctttcattaatccgttagcaactgttttgctatatacatttaccttttaagaggaggaattttaccaaatggcaaagtacactagagaagatatcgaaaaattagtaaaagaagaaaacgtgaagtatatccgccttcaatttactgacattcttggaacaatcaagaatgttgagattcctgtaagccagcttggaaaagcgcttgataataaagtcatgtttgacggttcttctattgagggattcgttcgtatcgaggagtcagacatgtacctgtatccagatctaaatacatttgttatcttcccatggacagctgaaaaaggtaaagtagcacgtttcatctgtgatatttacaatccggatggcacaccttttgaaggtgacccgcgaaacaacttaaaacggattttgaaagaaatggaagacctcggatttagtgattttaaccttgggcctgagcctgaattcttcttattcaaattggacgaaaaaggcgagccgacgcttgaactaaacgacaaaggcgggtatttcgacttagctccaactgatttaggagaaaactgccgccgcgatatcgtgcttgagcttgaagagatgggctttgaaatcgaagcatctcaccacgaagtagcacctggtcagcacgaaattgactttaaatatgctggagcagtccgctcttgtgatgacatccaaacatttaaactagttgtcaaaacaattgcccgcaaacacggcctgcatgcgacatttatgccaaaaccattgttcggcgtgaacggttctggtatgcactgcaatctatcactcttcaaaaatggtgttaacgcattctttgatgaaagcgcagatcttcagttaagtgaaacagcgaaacacttcatcgcaggtatcgtgaagcacgcaacaagctttacagcagtaacaaacccgacagtaaactcttacaaacgtcttgttcctggctatgaagcaccttgctatgtagcatggagcgcgcaaaacagaagcccgcttatccgtatcccggcttctcgcggcatcagcacacgtgttgaagtacgcagcgtagacccagctgcaaacccataccttgcacttagcgtattgcttgctgcaggattagacggaatcaaaaacaaactggaagcgccggctccaatcgaccgcaacatctatgtgatgagcaaagaagagcgcatggaaaacggaatcgttgaccttccagcaacacttgcggaagcgctagaagaattcaaatcaaacgaagttatggtcaaagcgctgggcgagcacctattcgaacacttcatcgaagcaaaagaaatcgaatgggatatgttccgcacacaagttcatccttgggagcgcgaacagtatatgtctcagtattaatctctcaatcccttggcactaaaggtgtcaggggattttttatgttaataggtaataaattatggagcggcactgctaaaaagcagggtcacttttagtctatgtcactaataattctatgtactaaattttcaattagggaaataattccacgcttaaggaagcaatacgcataaataattcgacaaattctgtgataattccattgttcaatacttctaccagcaataataagatgagcaaggtggatgattatcattgacatcataaccaaaaaaatccataattacgttgaaatctaaatcaattttcaaaaaggagatttccatgaaaaaattgactatcttttccgggggattaggagtggttttttctgtactggctcaactgtttgcggttatagatgactcttacactttggggaatttatggtttttaggtgctttggcgggaattataaccatgcttgcttcaatccagacaaataataaaccaatcttcagcattttattaatttctagttcagtaataggtctacttggaactggttttgtatacatcataccaacactgttcaatataataataatttataaattttcaaaagtaagccaataagccaatgggaaaattaaggttctttttttatttaacatccctttgacaaggtcggtaatgaatcgcagaatgttgcaactggtccacacagttggggaaatcgtgggcatgattatcgaacgccatgtttctaggataccggaattgaaacatttgctgagtcatttcgtgaagttgatcaccaaatgtccatttcaatagaggcacgtctaaagaagctatcataggaggacaatactgtgtggaaagctttaagtcaattactcaagaaacagaaaaatcaaagtccaagcgatgagggttatatacagattccagaaaaggatataaatcaagaattaaagcaagtgatatttgagttggagagcctgggggaagtagtatcgaaaaagctgcagaataagtatgcaggtgtttttgaagctcaggataaaccaaatctcagcatcaaagtttgtagagacatagatggagatgtgctaaatgattttacagctgagagatgttttgaaaaagaataccgttcacaaatagcaattaattactatcaacctgcaatagtctgtgatgaagaattagcctgtttcacaatggatttgtggtattactacggtggatataaagggacgggttgtggaacattattcgatttaaataataatgacttagaaaaagaaattgaagagacgctaatatttttgctcaatgacaaacaattcgagaaataaaaaagaaggccgcaaagcgctttcaatcaactgatgtagctaagaaaagcgtttaagaattagctgacttgggtgacagcgagttttccgggaagggtgcagacaacattaaagcattttatcatgatcatgccggcattacagatcaatgtatcgatcggattgacatggaaattgctttcttaagcatcatttttgcaaaacttgtagatgcaaagatgtaagatacttacatagaagagtcatttttaaaacatgagctggctaacgattacacaaaatcaaaattcattatgtctgaacaaaagaaaacgatgaaagacattctgaataacaccattgaataaatatcttaaggataaaaaagtgaattggtcaaaggaattgaaatatttaaaagggctattaggctccaaaacgcttgcaaaagatttaaaaatccaaatgaatgtttaagtatttgttttcaggtttagtgataactatgtctatacttaaaattatatccatttgataatccagagagaaaaaccttaatgtcccgtttaataggggaaagaactatgatatctcctagtcaccaatatataagaaatgggacaagcaaagatttgttaggcgcaactttaattaaataaataaaatagcaatcttgtgataatagtagctaatctgttggtacccttgccagcagcttttataaaacgtttttttgactttgagttgctctttcttagtctgataaaacttcttcattagcgtccgcttctcaatctaggatatgtgaaatcctcaatcgcattgcaaattcccgaaaagctttttctgtctttaaatcaagtccaaacttcattctctcggccgtctaagaagctaatttactgcttcttcttttcaggttccatgtaccggtctttacagtgtctgggagaaaaagtgatttggggcattcatctttttttatttcagctagcgaagtgaaagaccgatggcatttttcctgcatataatagctggaactattcaaaaaggcagggaatgaagttgagtgaatgatgtgattgtaaatggaggttttgaaacaggcaatctgacgggctgggcttctgcaaatacgtccgttattaatacttttgcccattctggaagatattccgcacagtttttcagtaaccagccgtatgcttttttagggcagatcgtgcctgtcgtttctggacaatctctgatattcatcgtttcgcttgggagaattggaaacaattcaagtccccaagtaactatacaaattttatttgttaacagtgaaggcgaagagattgaaggcggacaggaaattatcattgcttccggaaatttgccaaatgtctcatttaatacatggaatgaaatatatagaacaattgaaacccccgctgaagcagtaaacgcagtggtggtaataagcaaaactacttttgggtctgttctaattgatgatgtttctttaatagagtctgctgggggaattggaccgactggaccaacaggtgcaacgggagcaacaggcgcaacaggcgcaacaggcgcaacgggagcaaccggagcaacaggcgcaaccggtccaactggagtaacgggagtaacaggggcaactggtgcaaccggatcaaccggatcaaccggatcaaccggagaaacaggatcaacgggagtaacaggggcaaccggagcaacaggagtgactggatcaactggcgcgaccggagcaaccggatcaacgggatcaaccggagaaacaggtccaacaggaccaaccggagaaactggagcaaccggaccaaccggatcaaccggagttactggagcaattggagccactggcgcaacaggatcaactggtgcaacgggagtaaccggagccactggagtaacaggattaactggaccaaccggagaaactggtgcgacgggagtaaccggagccactggagccactggagtaacaggattaactggtgcgacaggagaaactggaccaaccggagcaacgggatcaaccggagtaacaggtgtaacaggatcaactggagtaacaggatcaacagggtcaacaggatcaacaggaccaaccggtccaacaggagtaacaggatcaaccggagaaactggcgcaaccggatcaactggagaaacaggagtaacaggatcaaccggatcaaccggagaaacaggtccaacaggaccaactggtgcaacgggagtaaccggagccactggtgcaacaggaccaactggtgcaacgggagtaaccggtccaactggcgcaaccggagcaacaggcgcaaccggtccaactggagtaacgggagtaacaggggcaactggtgcaaccggatcaaccggatcaaccggagaaacaggatcaacgggagtaacagggtcaaccggagcaacaggagtgacaggtgcaaccggatcaaccggagaaactggtgcgacgggagcaattggtgcaactggtgcaaccggagcaacgggagtaactgggtcaaccggagcaacaggagtaacaggtgcaaccggatcaaccggagaaactggtgcgacgggagcaattggtgcaactggtgcaaccggagcaacgggagtaacaggatcaactggaccaaccggagtaacaggtgtaacaggtgcaaccggatcaactggtgcaacgggagtatccggagccactggagtaacaggattaactggaccaaccggagaaactggtgcgacgggagtaaccggagccactggagccactggagccactggagtaacaggattaactggtgcgacaggagaaactggaccaaccggagcaacaggagtaacaggatcaaccggagaaacaggtccaacaggagtaacaggatcaaccggagaaactggcgcaaccggatcaactggagaaacaggagtaacaggatcaaccggagaaacaggaccaactggtgcaacgggagtaaccggagccactggtgcaacaggagcaacaggagtaatcggtccaactggcgcaaccggagcaacaggcgcaaccggtccaactggagtaacgggagtaacaggggcaactggtgcaaccggatcaaccggagaaacaggatcaacgggagtaacagggtcaaccggagcaacaggagtgacaggtgcaaccggatcaaccggagaaactggtgcgacgggagcaattggtgcaactggtgcaaccggagcaacgggagtaactgggtcaaccggagcaacaggagtaacaggatcaactggaccaaccggagtaacaggtgcaaccggatcaactggagaaactggagaaactggagatacaggaccaaccggagaaactggtgcgacgggagtaaccggagccactggagccactggagtaacaggattaactggtgcgacaggagaaactggaccaaccggagcaacgggatcaaccggagtaacaggtgtaacaggatcaactggagtaacaggatcaacagggtcaacaggatcaacaggaccaaccggtccaacaggagtaacaggatcaaccggagaaactggcgcaaccggatcaactggagaaacaggagtaacaggatcaaccggatcaaccggagaaacaggtccaacaggaccaactggtgcaacgggagtaaccggagccactggtgcaacaggagcaacaggaccaaccggtccaacaggagtaacaggatcaaccggagaaactggcgcaaccggatcaactggagaaacaggagtaacaggatcaaccggatcaaccggagaaacaggtccaacaggaccaaccggtccaacaggagtaacaggatcaaccggagaaactggcgcaaccggatcaactggagaaacaggagtaacaggatcaactggcgcaaccggagcaacaggcgcaaccggtccaactggagtaacgggagtaacaggggcaactggtgcaaccggatcaaccggagaaacaggatcaacgggagtaacaggggcaaccggagcaacaggagtgactggatcaactggcgcaacaggagtaacaggtgcaaccggtccaactggagtaacgggagtaacaggggcaactggtgcaaccggatcaaccggagaaacaggatcaacgggagtaacaggggcaaccggagcaacaggagtgactggatcaactggctcaacaggagtaacaggtgcaaccggagcaacgggagtaactgggtcaaccggagcaacaggagtaacaggatcaactggaccaaccggagtaacaggtgtaacaggtgcaaccggatcaactggtgcaacgggagtatccggagccactggagtaacaggattaactggaccaaccggagaaactggtgcgacaggagaaactggtgcgacgggagtaactgggtcaaccggagaaactggagtaacaggatcaactggaccaaccggagcaacgggagtaaccggagtaacaggatcaacagggtcaacaggatcaacaggaccaaccggaccaaccggatcaacgggagcaacaggagtaacaggagtaacaggtgtaacaggtgcaaccggatcaactggagaaactggagtaactggtgcaactggagatacaggaccaaccggatcaacgggagcaaccggagaaacaggagtaacaggatcaaagggagtaactggtgcaaccggagaaacaggagctactggtgcaactggagatacaggaccaaccggtccaacaggagtaacaggatcaacaggtccaacaggaccaaccggaccaaccggagaaacaggagcaaccggtccaacaggagcaaccggatcaactggagtaaccggagcaactggagcaaccggaccaaccggatcaacgggagtaaccggtccaactggagcaaccggatcaacgggagtaaccggtccaactggagcaaccggatcaacgggagtaaccggtccaactggagcaaccggatcaacgggagtaaccggagaaacaggagtaacaggattaactggtgcaacaggatcaaccggagaaacaggagcaacaggagcaacaggagcaaccggatcaacgggagaaactggcgcaaccggagcaacaggatcaacgggagtaaccggagcaacaggagtaaccggattaactggtgcaacaggagcaacaggagcaacaggagtaactggtccaacaggatcaacaggagtaaccggagaaactggtgcaaccggatcaactggcgcaacaggagcaacaggtgcaaccggatcaactggcgcaacaggagcaacaggtgcaactggcgcaacaggagtaaccggtccaactggagaaacaggatcaaccggatcaaccggagcaactggtgcaactggagcaacgggagtaactggagccactggtgcaacaggatcaaccggagcaaccggtccaaccggatcaaccggagtaaccggagtaacaggtgcaacaggaccaacaggaccaacaggaccaaccggttcaaccggggcaaatccacagctgttttacagtgaaatagcaggccccgttccgcttgctattaacggtactgaaacgtcgattggtactttaagtgtgccaacagtcgcaggacaattaataaaattagaccttgccatttctgtagatgttacaacgacagctaactcaaactttacttttcaaaccagaatttatagaaacggagtattagtagatacacgctccgtccaaagaaatatcagcgctgcaattacgtcaagatttccaattgctacaacgtatgtagatgctaccacggtcacaggcacgacttcttatgagattaggataatcttcacaacagtaagtaatgtgagtggcagcaacgcactaaacctagatataaatgctattaggttcccttaataatagagaattaaaaaatcacttttttaaaaaaattcaagcatatgaaacaagaaacctacttttaaacagtaggtttctttgtcgtggtattgaaaccttatcatgtctcggaatatccctccaaaaattttttaaggtaataagaatactggtctgtatcaaactcgttgccgcatgcatgtaagacccaaggctctttctgatgagggatgcccactatatatcctttttttctgaactcaaaacattgagaagtatcatataaatgccatccgttaaaaatatcttttcgccatggaacatcgtactgagtcgccagtaataaaccgtctaatgcttgaactgctttcacagtttcatcaatttcatcaaataataaatagttgtacgtgctgcggtattcaatgacttttccggcttttttagaagcctcccaccaaatcccgctttgcggcacttcttcagctcctataacgcctatcatgccaagctgatcattctgctgaaagacatggagaatatcataaataaaggaacgattgatgataaatgtgtcctgatgtaaatacactttatattttgagtcagagtcctccattgccgcctggtagccggacgccatactgtctgcgtctcggatattgattaattctaccttcatatgcggcggtacagaaagagactgaagatgtcttagacagagatcataaagggtatcgtcattcacacatgtaataaagctaattgaattttcgtttgtatgctgattcatcttttctctgcctttatgacatattgataggctctggcctcctcctcaagatctgcatggtgaattcccatgcatgatctgacataagcaagtttgctgatcattttttcataataatgagtcgtaaaaacaataggctcgatttggatgatcttgtagcctgtttcatgaaacatctttttcatttcctccaaggtgaaaaaacggaagtgtgttttatcgagcagccctgcctgtatatacgtccatttgccggacagcagactttcgaaaatcgagatatgtccgatattcgggatgcttgccaagatactccctgtttcttttacataaggcttgatgttacctaaaactgcccacgggtctattaagtgctccagaacatcaccgaagataatgtgatcaaatgtgtttttttgaaaaggcagcttcagtgtttcaatgtctcccgttattacttcgtcaatataatgtgttgctttttcggcagctggtggataagactcgatcccataataggagcaattcgttttttccttcacagctgcgccaaacaagccttcagcacatccgacttcaagaatggttttcgcatgcggttctatcagatcaaatagctgccagttgatgcctttgtaatactctttatcttttagctcatactctttcatagaatcagcaagtgaatttttattgatttccatgatgttcacccccggagccggtctgcatctttagaatatcttcaaaatattttttgttggctagcattcttgaatcatggggacggtattgcaatgccgattcattatgctgataggcaagctgatgctggccgagtttatcgtagcagacggctaattgcaggtggggaagccaggtcgcgcaggcgcggttttgaaaagccaggttttctgctcctttgttttctattgctttttcataccaatagaccgcactctgaaaatcgtttttttctaaaaaagagtatcccagcctgcagcaggtttctgctctaggcggtccatagacgagcgtgtggagcacccagcttaattctttttccttcagccccagtgaatggtagcagtctgctaatttattgcacgctctgatattatcctctacccatccctgcttcgtttgtaaaaaacgtaaatagtactcaatcgcttgctccatttttccgtgatcacacaactcgttcgcatagtaaaataaatctcttggagaaaaatcctttcctgacgaggccattttttcataaattcggaggttgcgatctgcgtcatgactaagtggcaggtgagaaaccgctgcatcactgtggtgaagtttcccatatacttctaggtattcatgaaccgcgccgatccatttaaagctcttttcccgttttacgagccggtatctccttaagctggatgtgacgttattttcttcatcaaaagccaaatggtatttcattgagaccgcgtctatatccggatcaagcgttctttttaaatccaataacagctcttgatctttcttggtaaacacgtcgtcggcgtcaagccataagatatagtcggatgtcgcctgctgaaacgaaaaatttcgggctgccgcaaaatcgtcaatccatttaaaatcaaagattcggtctgtatagcgagcagcaatgtctttcgtcttgtcaactgacccggtatccacaatattgatctcatcagctatctcctgcacagaatctaagcatcggccaataacagcctcttcattttttacaatcatgcataaactgattgaaatcacatcgccacctccgttttattctgttttttctttatggcatggacaaacatgtaatcaatatgggcatgttttgacaagtgatccaaagacaaaccaaattgcccggcaaggaattgaagttcttgtaaaaagagctgtatgtttgattcagtatcggaggaatgggaggtgatggattttatgtcataaaggtattcaggaaatagggtatttacgttgcgaggtgtgatgaaatgtgtgtacgtcgatgcaccacataataaagagaaaaatgtatctgcataggcagtatttgggatgctgcaaatcagcgagccagaaggctttagataaacggcaagagtctcaattgtatgtctgggattttttgagcagtttaaaaggtcaccgatcaaaattacatcgaaaaaggactcagggtaagggaggtcgcatgtttccacatctgccgaaatgacttgttcgtaataggggcttgcaatggtctgtaataactcatccttttcaatcccatacaataaacaggattgccggttcaaaagttctgtccccgcagctcccgtgccgcaaccgatatgtaagatagagtcggcttccgctggcacaagtgctgtcagctggggctgggagtcaaagaatgttgttacatccaccttccatttatcgatgaagcgttgccggttttcttcgtataattgattgatgcttaaatctggattgcctgtaaacgtggcatgaccgtgatggtggacaaacgaatcaagagcgataattagctgataccccgcttgcagtacgcggaggcttaaatcatcatcctcaaatgaaccgcctacaaaacgttcatcaaaaccgccgacttcatccaacaccttctttttgacaagcaggcaaaatccgaccagcctcaatacagcttttgatctgcctcgctgctgcaaacagtaaagacgagaaaaatcttcaatttcttcaacgtttgtatagttaacgggaacttgctgcggaccgctgacataattgcttacaggcccgaccatgccgattttatcatcctgataaagcagcttgatcattggctccagccattgatttgttacaacagtatcattgtttaaaaaaagaatattgtcccctgaggcaacttcaagaccctgattacaggcttttgcgaagccttcgttcgtcttattaaaaatcgccttaattgaagttatctgtttgaggtagtcacgtgtaccgtcatgagagccgttatctataacaattacttctatacagtcattattcgtatgcttccatatgctctccaagcattgttttgttaaagctaattgattataagtcagaacaataatactcgttttcactataacctccgcccttcgccatatcattcggatactatatgtatatcgtaatgttcagacggaatgattctttcctgtaaaaaggagaatgctgcttaaacgtaaaaatgtgaatggttttttaaagaaaaagtcgatgaatttgttttacatttagttttcccttaaggggatcaacaaggttggggaattcagggaaatagggatgataagttgccttaaccagtttgtatgaaagttatatttaattctttctgtactaaatggtgaattaggagttatatatttaaaggagaataccgatgagggcattattttatttaatacgtttatagcaggggagaaggacgaaatatcggtcagataaatttttatataggtttcgtgactttaaagggatcaattatgatttatagaatgttttttgtaactcaaactagttgagtactactttagaaagaatcatcgtgtacatataaacaatgataatttaatgaaatggacatcaatggtgtttccagaacatttaacgtagtttaaataagatttgattgacgtatcagaaattgaaaaaccgtccttagattagcaacatattgaagagatggatcttctagtctatgaggcacttgaatttaacaaagaattgctatcgagactatttgagatgtgtcgtaaatccactaataaaatctgtttttgaagaaatgtttaattcttaaaatggttaatcaatttaagtgcttcatttaagtctcttataagccgataaagtttactggaggacacaaatcataaaaatccccccaaaaaaatttttaagggggaataatacatatttaagaagtgtgacctctacttgcaacttcaaatgagtctttctcaataaaatatccaatatttttactccgactttagaagaagagatcatttgctccaacacaagccctcctatattaaatatgtaatattttatcatatttaaatgaataaggaagattaatgttatcttaaaaaacaaaaaagcctcctgcaaattatgagaagggtaagggaatatttttgagaatcatattccattgcttgttcacagtcagtaatccttgagttgttctagcaagaggcaatattgttgaataagaatagttttaaagaggttattgttgtcttcatattgaaataaagactaagtatattagaggggagttactttaatgcatatcacaacaaaaaggttattgatacgtgaatttgcattcacagattggcaggctgtatatgagtatacatctgatagtaatgtaatgaagtatatacctgaaggggtttttactgaagaagatgcaaaggcatttgtaaataaaaacaaaggtgataacgctgaaaaattccctgtcatactaagagatgaagactgtcttataggccatattgttttttataagtattttggtgaacatacatatgaaattgggtgggtgtttaatcccaattatcaaaataaagggtatgcttctgaggcagcccaagctatcttggaatatggatttaaagaaatgaacttacataggattatagctacgtgtcaacctgagaatattccctcataccgagttatggagaagattggaatgagaagagaaggcttttttaaaaaatgtattccaaaaggcaatgaatggtgggatgaatattattacgctattttagaggaagagtggaattgtaagagaggtaatgcaggaaattgaaaccataacagctatagaacgtatagtgatagtagggcttatagtgcttaatatgaatgatgtgagaggggtatccaaatgcaaattcatctcaccaaaagcggaaaacaagacaatcatcataaatggttaggaactgtcttgctcagttggggaacattcgtatttgctttgttttttgctactttagtcggttcaatggctagccaagcaggagcttccaagcttttgaagcaaggcatccaagcaggtttagtcacattaataactgtcccgttgctctacattcttcttaaacggatgtctagtagacccttttattctataggactgtctgggtggcggcaagccattccgaaagccataataggagcaatatatgtgattgtactatccgggtctggtttcgctatcgcccatttattaggctggatcaaagttacacaatttcacttctctgtccatttagtgacagcattgctcttaaatatgattatcgctttcttttatgaagcttttccagaggaattaacttttcgggggacggtgtactatgctctaaataagcgttggaactgttttatggccttactcctacagccgatcctgtttgtgcttgcaccaataactgtaagtggcttgcaatatatagttggaattgaatcatctgctatcacattagattacattgttttattgttgggttttggattcatccttcaactcctgcgtattgtaacaggaagcttatggacgtctatcgcttttcatctagcctttcttgaaaattctcggttcttcgtcctgcaggggaaggagcgctttattacctatgaagaaattgttccgggaacaggtgcgctgtttgtgatcttttttatgttgcttattgccggtactctactcttaatacctgttgcgataactcgccgaaatactattcaatggcggaagaatgagaaatgcgaccaagatgtttaatttctaagtagaacagtagttttaaagtgattttaaggaggatctagacaatgttgaagaagcattcatgatgaaagattagtagattttgattctcaaggtggaaaccatattagtgtttatttagttactcactttgagttatctgatcaatcgtattcttttgggtatgaagcataactgttcgtatgcaatggatattctaagcgttaaagaggaatttgatttcgatttcccatttaatatgcttgcaataaaaagctatgtacaagaattaataaaatgttagggattgatataactctgcctgaaatgaaagaaagagattttgacaaactttctcaagattaaataaaactacgattttaaagagaacggagacttgctttcaatatgaatgttaaaaaaactgcagctgttttttcaatcacgattccaattatctcagctatcctaattattaatttttttacgggagttatgtcaattccatggcaaggaatgccggtgttttttccattattgctttctcctataggaatcattttagcgttcgtttcaataaagacaaataaacggtgtgctttatatgggattgtcttaaatgcaattatgtttccatttccttttttctggtttatcggaggggctttgttttttggagtttaaaatccattaggcattacgcttatacattggtattttcgaacttgtcaaaagaaggaataaaaaaatttcagaattgcttggctttactttatgttgaaaggggtcgagtaaggtggataggaaaaaggatgaaatacaaagaaaatatagggaacaaatgagggagaagaaagaacgagaaaaagaagatggcagttcacatacttttgaaattgttgttgtgctagccattatcattttgatgtttttctttaattcagttttcaaggctttttagatattgtacagatgactttcaggatgtttgaaaaaataaccctttgatatatataccacatgaaagtattgaaggacttatgaaaattcaagagccagttgaatcttaataattaatcaccaaataatggggatgtaaaatgaaattgtataatgaatttatcaatatagctaaaatttttaataaagagctagacatcattccattattatatggatctttaggtcttgaaaaggtaactgggttagacttttctccagaagatattgatctccttattcctttaatttttttagaggaaaagtgggaaaaactaaaaaaagtgatggaactgcatggatacaaaatggttgatttacatgagcatgaatttaagaaaactaatacaaaaataggcattgcttacattgaggatttaaaagcatttgcagatgtagactataataatctagaggtttttgaagatggcggagcgaaatatcatttgctaacgattgatgattacctcaaggtttataaaaagtctttattagatggttatagaagaaggaagaagaatcataaagaccaaagtaaaattaacatattgaataaattaatacggaattaatttctgtattctcttttgtttccagtctcaattaaaatttttaagattaaaataagtttgaaaggataaatcatagtgtttaacacagccattaatcctcagacagtcaaaaagccatttctactccggttgaaagcttttcaatttttgcttcttatttatctttcctgtattgatatatgtatgtagggttggacttataacataaactattctggccattcctgttctttcaattcatgaccgggcttgccatcagcataaatctaggctaacagtctccatacatcctgtgatcacctttatcaaactcttaaatgcaacttaccactaaccaattctttatttcgcatagatcatctttgtcatgtgtttacacaagaatctgttttggactaatcgtcgttaactgatacatgacattcgcaaatatttgagacactgaatataacgaaacagtcaaaaatcaatatttaattcattctgtttaaactttctgaaaaagatgttgaaaaagttgaaaggattttataatattaaaacaagttagtttgttcgatcaacaaactaataagatgaactttcattgtccacaagataaggtcttactaaatatggatggaagggggataagagggtcgatttaatggagctaaacaatataagaaacgaaagaatgaggcttttatccttttccaggtatataaggtatgacgagaaaagatgaattttttgcttgctgatcaccatattttttcgcactgttttgaaagcgcttttataaaagtttactgaccgtaaattcgagaaattgttataccgtttcacactgttccatattaaaggatcgaaaaggggagaaatcatgctcagtgaaaatgtaaagaagattagcatggttgaaaaagttggatatgcgtctggagattttgcttgtaatttaatttatgcaacagtgtctacgtatcttttgttcttctatacagatgtttttggtttatcggcagcagcagccggtactatgtttttagtggttagaataatcgacgctctcgctgatccttttatcggaacaatagttgacagaacgaacagcagatttggacgctttagaccgtatcttttattcggagcttttccatttgtcatactggcaatactctgttttacaacaccagacttttcggatatggggaaattaatatatgcctatataacctatgttggcttgtcgcttacatacacaacgataaacgttccatatggcgcgttaacttctgcaatgactagaaataatcaagaagtggttagtataacttctgttcgcatgttatttgcgaatcttgggggacttgtcgttgcattttttgttcccttactggctgcttatttaagcgatacttccggcaacgagtctcttggctggcaactaaccatgggtattttgggaatgataggcgggtgccttttaatcttttgttttaaaagcacaaaagagcgggtcactcttcaaaaatccgaagagaaaattaaatttacggatatatttgagcagtttcgtgttaatcgtccacttgttgtattaagtattttctttattattatttttggagtgaattccatcagtaattcggttggcatttattacgtaacgtataacttagaaagagaggatttggtgaagtggtacggtttgataggaagtttgcccgctttggtcattttaccgtttattccaaggcttcatcaatttttggggaaaaagaaattactaaactatgcattattactgaatattatcggcctcttagctttactgtttgttccgccaagtaatgtttacctcatacttttctgtcgattaatcgctgctgctggaagtctcactgccgggggatatatgtgggcgcttattcctgaaacaatagaatatggagagtacaggactgggaaaagaatgggtgggctcatttacgctataatcggatttttctttaagtttggtatggccttaggaggagttgttccgggtctggttcttgataagtttggatatgtggcaaatcaggcacaaaccccaacggcattaatggggattctaattacaacaaccattattcccgtgttcttgctggttctagctttaattgatattaatttctataacttagatgagaaaaaatataaaaacatggttcgagaattagagaatagagacaaagtttatttggatcatattgatgatttcaaagcttaaaaaagaaaataaactgaggaggagtcccaaatgaagattaccaatccagtacttaaaggattcaatcccgatccaagtatttgtagggcaggaggggattattatatcgctgtatctacatttgagtggtttccgggagtccagatacaccactcaaaagatttagtaaattggcacttagttgcacatccattacagagagtttcacaattagacatgaaaggaaatccaaattcaggtggggtttgggcaccatgtttaagctatagtgatgggaagttttggctgatctatacggatgttaaggtagtagatggcgcatggaaagattgtcacaattatttagttacttgtgaaacgattaatggtgattggagtgagccgattacattaaatagctcgggatttgatgcttctttgttccatgataaggatggaacaaagtatttattaaatatgttatgggatcaccgtattgatcggcactcatttggaggaattgttatacaggaatattctgataaagagcaaaaattaatcggtaaaccaaaagttatatttgaaggaacggatagaaaactgacagaagctccgcacctttatcatatcgggaactattattatttattaactgcagaaggaggaacacggtacgaacatgctgctacaattgcccgttctgcaaatattgaggggccatatgaagttcatcccgataatccaatcttaacgtcatggcatgacccaggaaatccattgcaaaaatgtggtcatgcatccattgttcaaacacatacagatgagtggtatttagctcatttaacgggacgtcctattcatcctgacgatgattcaatttttcagcagagaggatactgtcctttgggcagagaaacagctattcaaaaactttactggaaagatgaatggccctatgtagtaggtggaaaagaaggaagcttggaggtagatgcaccttctatacccgaaacaatatttgaagcaacgtacccggaagttgatgaatttgaggattcaacattaaatataaattttcaaactttaaggattccattcacgaatgaattaggttcattgactcaagcgccaaatcatttacgattattcggtcatgaatcattgacctcgacatttactcaggcatttgtagccagacgctggcaaagtctccattttgaagccgaaactgctgttaagttttatccggaaaattttcaacaagccgctggattggtgaattactacaatacagagaactggacggctcttcaagtcacgcatgatgaagaacttggccgcattcttgaattaacaatatgtgacaacttttctttttcacagccattaaataataaaattgttattcctcgtgaagtaaagtatgtatatttaagagtaaatattgaaaaagacaaatattattatttctattcttttaacaaagaagattggcacaaaattgacatagcactggaatcgaaaaaattatcagatgattacatccgtgggggaggattcttcacaggggcctttgtagggatgcaatgccaagataccagtggtaatcatattccggccgactttagatattttcgttataaagaaaaataatttgcacatgaaaaaggagatttctattttagaactcctttttcatatgagaaggtgcctatgtcactattgcttcagaaatacccctagaataaaaaaactcatctttaaagatgagctgtacattccataaaaattacattgtaaccatgtccagaaaatgatcaatcacaatggaggacattcctaatgccggcgcattctgtcctaaggaagatggcaataattcatagctattgcctaattgggaataaacccttgacgatacttcacttctcattgaatttaaaaccataggatgtgattcaattatgctatttcttaaaattacggcctgtgggttgaaagtattcaaaatattggtaaggcctattcctaaatagaatccaaaattctgtaatgcgtttaaggttccgatatcattcagatgggcgaggtttatgatgtcttgataggacagttttttctctttggtctgaagagattttaataaagccttctctgaagcatacaattcccagcagcctcggtttccgcaactgcatttaggaccattaaagtctattgtcatatgtcccatttctccagaaaagccgcttactcctctatataaatgattgttgataataacaccgatccctatccctgtgctgatacttacgtaaataatgttatcgtgattttttgcagctccaaatactttctctccatatgcgccagcatttgcctcattttcaataaaaacaggcacattgtacttctcttgtatcgaagattttaagtcaatatctctccagttggagttcggagtgaaaacaattttttgatctttatcaatgagtccaggcacgcaaatacctataccaataagcccgtacggagattggggcatatgcgtcataaagtgatgaatcatatcaatcaaaatgtctttcgttatttctggagaattggattccaaatgacggtattgatcaagaacgatcgttccttcaaggtctgttaaaatgccattgatataatccacaccaacatctattcctacggagtatcctgcctttttattaaaaacaagcatgacaggtcttcttccgccacttgattgtccttgacctatttcaaataccagattttctttcattaacgtgtttacctgtgatgaaacagttgatttatttaatccagtcatttcagataattttgctcttgaaataggtgaatttttaaggatttcttttaataataacttttgatttacttttttgacaaaggtttgatcagcgatatccacttcatccactccatttgtttaatctttaaattaagtataaacatagtacatagcgaatcttccctttattatatctaatgtgttcataaaaaactaaaaaaaatattgaaaatactgatgaggttatataagatgaaagtaagttagtttgtttaaacaacaaactaataggtaacttacaatatgaaataaaatgcatttgtatttgaatgatcaggttttgaatttatttttaagggggaaatcacatggctcaatctcattccagttcaaccaactattttggaagcgcaaacaaagtggtttacgaagggaaagattcgactaatcctttagcatttaaatattataatcctcaagaagtaatcggcggaaaaacgatgaaagagcatttgcgattttctattgcctattggcatacatttactgctgatggtacagacgtttttggagcagctacgatgcaaagaccatgggatcactataaaggcatggatctagcgaagatgagagtagaagcagcatttgagatgtttgaaaaactagatgcaccattctttgcttttcatgaccgggatattgcaccagaaggcagtacgctaaaagagacaaaccaaaatttagatatgatcgtgggcatgattaaagattacatgagaaatagcggcgttaagctattatggaataccgcaaacatgtttacgaatccccgtttcgtccatggtgccgcgacttcttgcaatgcagatgtgtttgcgtatgctgcagcacaagtgaaaaaagggttagaaacagcaaaagagcttggcgctgagaactatgtattttggggcggccgtgaaggatatgaaacattgttaaataccgatttaaaatttgagcttgataatttggctagatttatgcatatggcagtggattatgcgaaggaaatcgggtacacagggcagtttttgattgagccaaaaccaaaagagccgaccacccatcaatacgatacagatgcagcaacaaccattgcctttttgaagcaatatggcttagacaatcattttaaattaaatcttgaagccaatcatgccacattagccgggcatacattcgaacatgaattgcgcatgacaagagtacatggtctgcttggctctgttgacgcaaaccagggtcatcctcttttaggctgggatacggatgaatttccgacggatttatattctacgacattagcaatgtacgaaatcctgcaaaatggcggcttaggaagcggcggattaaactttgacgcgaaggtcagaagatcttcttttgagcctgatgatctaatatatgcccatattgcagggatggatgcatttgcaagaggattgaaagttgcccacaaattaatcgaagatcgtgtgtttgaagatgtgattcaacatcgttaccgcagctttactgaagggattggtcttgaaattatagaaggaagagctaatttccacacacttgagcaatatgcgctaaatcataaatcaattaaaaacgaatctggaagacaggagaaattaaaagcgatattgaaccaatacattttagaagtataacaggataagctccagatcctgctatcaataccaagtcactgaattacccgtcatgattcctttcctattgcttgttgttatgacgggtaacttctataattaggatttatttagagtgaatggtttttaaaagggcaaggagtgaaaaaatgaagtatgtcattggaatagatcttggaacgagtgctgttaaaaccattttagttaatcaaaacggcaaggtttgtgcagaaacgtccaaaaggtacccgctcatccaagagagggcgggatatagtgagcaaaatcctgaagactgggtacagcaaacaattgaagcattggctgaattggtttctatatccaatgttcaagccaaggatattgacgggataagctattcgggacaaatgcatggattagtactgcttgaccaagatcttcaggtgttacgtaatgcaattctttggaatgataccagaacaacgcctcaatgtataaggatgaccgagaaatttggcgatcatcttcttgacatcacaaaaaaccgtgttttagaagggtttacattacctaaaatgttatgggtaaaggaacatgaacctgaactttttaaaaaaactgctgtgtttttgcttccgaaagactacgtgcgattccgtatgaccggtgccattcacaccgaatactccgatgcagcaggaactttacttttacatattactcgcaagaagtggagcaatgatatttgcaatcaaattggtatttctgcagatatttgtcctccgcttgttgaatctcatgattgtgtagggtcgctgcttccgcacgttgccgccaagaccgggctattagaaaaaacaaaagtgtacgctgggggagcagataatgcttgcggcgctattggagcaggtatcctttcttccggaaaaacattatgcagtattgggacgtcaggggtcatactttcctacgaagaagaaaaagaaagagactttaaagggaaagtccacttttttaatcatggaaaaaaggattctttttatacgatgggcgtcacgctcgctgcaggatacagcttggactggtttaaaagaacgtttgcaccaaacgaatcgtttgagcaattattgcagggggtggaagctattccgataggagccaatggactgctatacactccttatttggttggtgaaagaacgccgcatgctgattcttctattcggggaagcttgatcggaatggatggagcccataatagaaagcattttttgagggcaataatggaaggtatcacattctctttacatgaatcaattgagctattccgcaaagcgggaaaatcagttcatactgttgtttctattggtgggggagctaaaaatgatacgtggctgcaaatgcaagctgatattttcaatacgagggtaattaagttagaaaatgaacaagggccagctatgggggctgcaatgctggctgcctttggaagcggatggtttgaatcccttgaagaatgtgcagagcagttcattcgtgaggctgctgcattttatccaaaggcacaaaatgttcaaaaatataaaacactatttgatttgtataagaacatttatactcacacaaaggatctcaatcaagctttgaagagctttcgaaaaaactaatgatgttattgtctggagatcaacgaaagaacaattaacgattaatcatcaaaggcctttgatgacatggctgccttcttttgaaaagatggtgagaataaggtatcgcaacctttaaacagtattggagtgtccagcagacaaaacgaacgagcggaaccgtattctgtcagcgaacacttcaagaagtgagaaagcttaggaatgccaatgggtaagatgtatgaaaccgcgctaacgacggtagagggatctcttgatttatgatgaaataggaaggatgtttacacacaaataaccccctcacattgacgtgaaggggtgttttttattgttactatacagcggaaattttacaggctagttgcatgattttagcttgataagcagaatggaactagactctccatcatctctttctaattctttggaaactgcattctgctaggtttgctgctttttttaacaaacagtgtttttctatttcacacagccattaaatcctctgttcgtcacataaccgctcttactccaaattgacagtttatctgattttgcttcttgctcatctagtctgaattggtctatgtattttgtgttaggctcatatacatatgctactctggccaatccctctttcaataatgtctcttgaacagatttgccgtcaacataaacgtatgctaacagtcttccatacttatctctgcgatcgcctttatcaaattccagctgtagcttaccgctgttgaccaattctttatttcgtttcgacgcatcctcaccgtatggttgaacacaagaatttggtttcttcgtctcaggtgtatcaacgagcaagtagcgcactgtgtcttcctttccgttgtaaataaccttaatcgtatctccatctattgctctatctaatgtaacatcgaccaatttcttctgattttttgaatgaggcgtgccggccttttgttctgtctgattatatttattagattgagtatcttgagagacttgctccgtcccattagaatctgaatggtttttggctgcgtgatttgatccgcaagctgccaaagtaatacttaaaacgattgcgatcatactgatcaaaatcttcttcatattgattccctctttatcattttctctttttgcgtttaaacatcatcattataacgatatggacattttttgtgaatggaaaacttcaagggaacttataacactccaaattgccaatagttaactttacaacgagatgatcaaaacatcaccatcacatagcggaaataaataatcctgaaaataatattgactgaaaatgcttttggaattatgataatatgagaaatgacaataatgtaacaaaaacattactacaacataacaactgatagcttaggtttattctattggctaaaaatgtaaacggttacaaatccagaggcgaaaatctaagatagagatgactttagttttgactcaatatccacactgaaagagcttattaagtattcttaataaaggcaggggaaatggatatgaatgaacatcgaaatcgaaggttgaaattaataatgatttcagcaacttttggagggcttctctttggatatgacaccggagttataaatggagctttaccttttatggcaaggccagatcagcttgatttaacaccggttacagaagggcttgttacgagtattcttttattaggtgccgcatttggagcgttgttatgcggaagattggctgatcgatatggccgacgtaaaatgatccttaatctttcctttttatttttcctggcatcactgggaacagcgttagcacctaatgttttcatcatggcggcctttcgttttttactggggctggctgttggaggagcctcggcgatggtgccggcctttttagcagaaatggcaccgcatgaaaagagagggcgtatggtaacccaaaatgaactaatgattgttggcgggcaatttttagcatatgtttttaatgcgatcctcggtgtaacaatggcaaatacgggacatgtttggagatacatgctagtcatttgtgctgttccggctatcatgttatttgccagtatgcttaaggtcccagaaagcccccgatggctaatcaccaaaggcaaaaacagtgaggcgctgcgagttcttaaacaaattcgagaagataaacgtgcagaagctgaatgtagaaaaattcaagaagcggtagaaaaagatacagcactagaaaaggcatcactcaaggacttttctacaccatggctgcgccgtcttttatggattggaattggtgttgccatcgtgaatcaaattacaggtgtgaactcgattatgtattatggcacacaaatccttaaagaatctggttttggtacaaaagcggctttaatcgctaatattggaaatgggctgatatcagttattgcagttatatttgggatttggctggtcggaaaagtgagacggcgtccaatattattgattggtttggcggggacgactacagctctcctattgattgcgattttctcaattgtgcttgatggatctatggcacttccttatgtagtgctttctttgaccgttttatttcttgcctttatgcaagggtgtgtaggacctgtgacttggcttgtcatagcggaaatattccctcaaaggttaagaggacttggttctgggataagtgtttttttcctttggatattaaactttgtgatcggttttgctttcccgatcttgcttagctctgtaggtttgtcttttacattctttatatttgtggctttaggtgtattggcaatcggttttgtgtacaaattcatgccggaaacaaaagggcgtacacttgaagaattagaagagcattttcgttctcgacacgatcataatactcctgaacaatcagttattgagttataaatatgttgaaaatctctcttcttataggagggatttttttagtttcagaaaaaacaaaatccctctggtagagggattttgattcagcattttaagatgttctacacgtataatactggagttgatactttaaaaatctcgccatctcttatataaaaacgagggatgcggcggcttaatgtagacacgacttcatagttaatcgtattgagcatttcagccacttcatcaacggaaatctcggctcctttttgcttaccgtaaatcacgacttcttctccttgtttaccttcaccgttttctcctaaactgaccatgatcatatccattgttactcttcccgccactggcactcgttttccgcgatgaagaacaaatccgcgattggaaagggcacgagaatagccgtcagcatagccaatcgggagtgtagcaattacttcattaggttctgcgatgtatgtagcaccatagctaacggttcggggttctgtccgcatggttttcacataagcgatgcgtgcctttaaacttaacgcaggttcaagcttaacgagatttagttgtttaatataggctgaaggatataaaccatataagccgatacctaaacggatcatatcagcgctaaattccggaaatgcgatagctgcagccgtgttgcacatatgcacggtgggcagctcaatcccctgtttttttaaaaagctgagaaaactgatgaatttttcatgctgcagctttgtgagtgtggtgtccggttcatcagctgtcgaaaaatgtgtgaaaatccctgtccatctgaggaatttacttgcctttaaggctttcactacttctaaaagttcttcctttgtgcgtacacctaatcgtcccatgccggtatccacgttaatatgaatggccagccggttagcactcgcttctttttccaatatctcgtttgcttctttcatccaatcaacctgaaatgctgataatgttatattccaagctgctgacttctttacacaactaagggatgtaaaaccaagcacaaggataggtgctgtaatcccagctttacgtaaaacgattccttcctccacactggcaacagcgagctcactcgccccgtgttccagtgcatggcgtgccacttctatagacccgtggccataaccgttcgcttttacaacagccataattttgctcttatgtggaatatgacggcggatcgctcgcaaattctttttaacggcatcaagattgacttcgatccaaacttctcggcaaagctttatcatcaacgcttccttccttcttatggattgtaaataccacctattgccgcaagaataaatgttaattgttggatgattcgatcttattttattcaactttatttgaaatcattcaacagcaaatccatgtgatacgagaaggtgcctatcaatgttcgaataatagcaagtacgggatacatgaggcttgtaagtggggtgttaatggatgcggcgaccgaggattacaaaaatgattatttgttttgggacatttttttctaagggtagatgataacgagaaatctaatcaggaaatacttaccgttgttatgaacattgaagaaccttttaaatgagaagggctgaggaaattctgtaaaagataatcggttgaaaaggcagtcgattccttgttccataaacctaacatcagagtatataattatactcgtattcacaaaaatcgtttaagtaaggggtatacatgaataggggagttagttttcaaataccgaatgaatatggaaattttctatggagaatactgcagccggtagaaatagctaattataggtggcaaacgagtggggaatcttattttgttgtagaaggagagctcgatgatgaggagctttttcatgactacgcaattgttgagggggcagtttttgagcaacaattaaaaacgaatcagtactataccattttcgttgaactgaaagcatttccatatggaaaaatggttaatcaagtcaatacatatgaagagtttgctgacagtgattgcgaacttgtccttttgatagcagataatagctacgtttcgatttactgtaaaaacaaaaatatcattgaaaaactttacttcaatgctttacagaatgattttgaagacgttcaatttataactgatgaaaatgacacaagaacaagccttactgtatgatactcaataaaaattaaaggagctagtacatgacaatgcaaattaaaatcaagtatctagatgaaacacaaacaagaatcagcaaaattgagcagggagactggattgatcttcgggcagctgaagatgtaacaatcaaaaaagatgaatttaagcttgtcccattaggtgttgcaatggagctgcctgaaggttacgaagcacatgtcgtccctcgttcaagtacatataagaactttggcgttattcaaacaaattcaatgggtgttatcgatgagtcatataagggagacaacgatttctggttctttcctgcttatgcattgcgtgatactgaaattaagaagggtgatcgtatctgccagtttagaatcatgaagaaaatgccggcggttgaattggttgaagtcgagcatttgggaaacgaggatagaggaggactcggttcaacaggtacgaagtaaacaaaataaatccttggctgtcttcatgctgtgtgattgatcaatggaggtttcagccaaggtacaaagaaatacttttatctaaatttttataagtaggggaaggcaactacaaactagtaatgccactaataataagccaagttaaatgacatgtgttcattaataattgaatttacagcagccatgagcacaaaaaaatctgagtatcgtcgataaatatcataaaaaaccccccggtatgtcgccggggaataaatagacgtttaagagatttagtgatgttttttatatgattcgacaaaatcataataatgatcatcgtcatcataatactttttttcgtaatgataatcgtgatcatcgtaatactttttatcatggtcatcatactttttgtcgtaatcataatgttttttatcatgatcataatacttgtcgcaatcataatgcttcttatcattgtcgtaatactttttgtaatatgtttttttccaagtgtaatactcttctttatattttttataataacccaattaaattcctcctttatgttattcgaatttaatttatgaagtttaaatgatatggtatggtcaaatgaaataagaatagtaaaaagaggctgtttaaaacactttctgaaaaacaaaacggatagctgtttattaaaacaagagcgagagaaagcactcaatcactgtaaaataatagtaaagtgtatagagaggattaatatacgtaaaaagggactttctcattgaagaatatttgaacgttatggttaagattcagagctctatgatgtgatttttaacactgcttttgaaggatttaaagttagacatcaaaaacaaacagcaaaaccggttagaaacagatcatataaggaatgaaccgctgccaaatatcataaaaaagttgttaatgatcaaatgaatgaaattagagagaatttattttaaagaaagcccaattgcacatggacaaatgacaattgatattgaggtaaaatacaatgcattaaatcagaaaaagctattggaggatttaatgtgtttagacaatttccaatttggtatacacaaacacctgactatttgaatttttatgtaccgcaatatcaaaccatttcgtataatcctcaacaatgttatcaacggtgtatgtaccaaactggcggtaactatgagctatgtgacagactatgttatggagaaatacaggtgtaaaagaggggggattaactcctctttaaacacacagtgagtggaataagatcctcactttatctgcaagtgcttagtatttgcgataatattgcattcgtaataaattatgcttagcaactgaaaatgaaagaaggatatgaatagtcatgacgcaattcgataaacaatacaattcaattataaaggatattatcaataatggaatctcagacgaagagtttgatgtaagaaccaagtgggactcagatggaacaccggcacatactctaagtgtaatcagtaagcaaatgagattcgacaactcagaggttccgattttaacgacaaaaaagcttgcctggaaaacagccattaaagagttgctctggatttggcagctgaaatctaatgatattaatgatttaaacaagatgagcgtacatatttgggatcaatggaaacaagaagacggcaccatcggacatgcatatggatttcagttggggaagaaaaacagaagtctaaatggagaaaaagtggatcaggtagactatcttcttcatcaattgaagaacaatccatcttcacgcagacacattacaatgctgtggaatcctgatgaattagacgcaatggccttaacgccatgtgtatacgagacacaatggtacgttaaacatgggaaactccaccttgaggtaagagcacggagcaatgatatggcattgggaaatccattcaatgtattccagtataatgtgttgcagcgcatgattgctcaagtgactggttatgagcttggtgaatatatctttaacattggggattgccatgtgtacacacgtcatatagacaatttgaaaatccaaatggaaagagaacagtttgaagcacctgaactatggatcaatcctgaagtgaaagatttttatgactttaccatcgatgatttcaagttaatcaactataaacatggggacaagcttttatttgaggtagcggtttaatgctgcctttttattgttatttttcagaatataagctggcattaggctaaaaatgaagaaatttcttcttcatatttctataaacaaatagtaaacaaaattggagcccaacgcgaaacaaaaggattgttagaagcgttgggttctcttagtacaagtgaacaacgattgcgtggtctgaaaaattaaacgaacgatatgaaaaggccattggttttataaggtgttaattcctcctattaatatcataaggctcaagaaaattgtaatgaaaagaaaagcccatactatagctgtaaaaggattgttgagtcccatcctttctttccaatttatattagtggatcgattggttttgtattttattaactggatacataagatcacattaaaaaaaactgaaataacaagagctataactaaataaaggttcattttcatcaacctttctaggttttttaaacacttgaatagcttaattgtaaacctaatattaacatatacatatttcaccttaaaagaccagcatcgtgcaatgaatacaattactttgtgcagttctaggttatttgtttttattatgaaactttttggtccctggctaaaattcaacttaaaaatgaaaagattgaaattatccatgattgtgtttctgcgatggattgccttaaaatttggtagggatgaacaagcactatattaaataatactataccaatgaatttctattagaaaaattcataatattttaaaataaccatttaaatatatttctagaaattgtatacttatatggtactaaatgaatacatagaaaggactgttgtcgatgaaaaaagttttttgtaagttagccattagttctatagctctatttaccctatctcttcctaatggcaatgtattagctgctgaaaaaggggaagaaaaacctgtctcaattaaaggcgttgagtcacaagtgcatactgtatttgcaaacgagacaactggggtaaaaagcaacttaggaggaggagagtttactgcgcaatttgtgaatgattttcgtaatgttaagatgaatgtaaaaacatataaaagctggtctagctttaaaagagtttctgataatatagcaacggggagtaaaggaggatctattactgcaaacaaaacagttacttttacaacaactgtcagcggatctataagtggtttaggaatatccactgcaggctctgtagctagctctaaaggatacactctaaatgttggagcgaataaaagagtctatatggcatatagagttaggtataatgtagaagaagggtacaattgtcgtaaggatatagttactggtaaatgtgtatcaaagaaaaaatacgtagttaaaaaacctatgtatggagaatatgcactgaaaaactattaattttatataaaaaagattagctataaaagctaatcttttttattaagaagaaaatatcctaattttgaaacgagatacaaagtgaaagcaatcattaatgttctcgatataacaattccatgaatagccaaatcatatccagcaggtatcaaagcttttgtattaaacataaaatacattgataccagaagagcaataataactaaaataattccaaaaagacctatttttccgtatttcatacaaattccaccctatattaaaatatgataaataaccaaaggagctgaagatttcgataattcactttacaatcatcaagcaatgaccaacatcgaacctttgttggtgtaattgtcaacttaagcttcaagttagttatttttgtaattaaaaaataattgaaagccccataaataaggggcttttaatttatgtagttctatagtaattgaattaatcataccaaagttatttcaaaatttcaacttttgcttatgatgtttttatcatcgaaacaaaaatgtcttaattctaacgctgttcaaataaagtttcatataaaaaggaagtactactgttcgtaaatctatatagggagtggattccgacacggttttttatggagatggaaaattaattataaaaccgccagacaatgctggcggctttttgctgcttcgtttatttattaacagagatcgtaacgttatttcctgcaactgaaacctttgcgaaatcctgtgtatctaccacaggagtgacggctttattgtcgattgtgatgttgttaaaagatgtcgaaaaggttgctttgatcgcatcacgctggctttcatacgaaacagccgcggtagcaagggttttccattttgaaatcgtgccgatgttggttccttgaatttctgtgataatccgtccggtgtagccgtcattgttcgttccccaaagggtcatgcgcgtattgccgcttaaatttttatagattgtcatttggactgtgcttccagggcggaagcctttattgtatgtgaatttgtcttttccttcgatgtacgtttcttcatttttggacccaaccttcatgaggggcttccagacgttgtattgtttgctgtactgaagcccgatatcggcttcagttccgcttgttgccctaaagccagaataaatatagggagtagagaccgagtcgttgtttttgacagtttcaggaagcgtgattttagctgtaaaaatggcgcccgtactgttcaggtagacacggccgccgattccgttaggcagctgggatgctgcttttgcgacttgagcgtctgccgcgggtaaacctggtatacctgatgaaagggttccgaaaagaactgcagttcctactgcacctgcaatcaatacttttttcatcaaaattccccctttagatagtggtttcgccatttattatacctaattttggaactggattgatgtatataaatcgacaaaatatttcattttgagtgaagtaagggacgaaacgcttcgccaatctgaaagctatatacctttatcagaggaaagaatgagatcacaatcgttttaaccgatttgaaattttcctcaaaataaaagtacaaatgcttaaagaaacgattattaaaagaatgcccgctatcgtttcccagcctgtaaaaaagaggtgacgtttcatcaatgtctgtccttgtaaaatgataaaagcacagataccgactaagaaaagaaaacaaatacttaggattgctaacgctttacgtgagtatgttttcatttcatctttaaaatacagcaatacgaaaacaaagcagataacattggctattgtgcttatcacctcaaagcttttcatgacaactgatataaatagacaaagtaaaatgagataaaatacgatgtttctatacaaaaaacctctccttttatgtatgatcctcaaagagtttataaaagtttctttgtaactgcaataaactgaatgcgctcaattatgaactaactaaactatgtactaaatattcactattcattttcagattcagtcaccaaggttttcatagaaagggaagcttcagaaatatacatatagtgcacaaacaaaaaagacccggcaatagccgggggaaagtaaaaacgaggagatgttaatggcgtttagtagtgttttttatgctttttatactctacaacataatcatagtcttttttatcgtgatcataatattttttatcatagtcatcatattttttgtcgtaatcacagtcataatcttttttatcatgatggtcataatcttttttatcatattcgtaatacttcttataatacgtttttttgaccgtataatactcttctttgtattttttgtaataacccatatatactcctcctttatttttactacgctttattatacggcgagtagattttgcggcttggacagttaaaatcatagaaggaaaaaagggctgtccaaatgatagaaaaagacagatgacacaaaaacaaatcaaaataaagagccgatttttcatcggcccaaacgatttatcctacatttgtttgtcttcttttttttctgagtcattttttctgatatcctgagtcagtccgcttgttgcttgtttaaattctgataaggcttttcctgctgcacggccaagcgccggcagtttatcaggcccaaatactaaaaaacccacaaacaaaataacgagtatttttgtgaagcttaattccatatccttttccccctgattgaagtacaaccttttaaacaaattataagagatagcagtacaaatgggaatgcatttattttgaacattttaaaaccagacaaagacggattcataaaacggctgctgctgaatataatgtccaatgccacctgcctaagaagcagggaggaaggctggatcaattatgtagctctgccggaaatgatacaaacgtatctgcggctatcattgaaatagaggagtggtgtagctgatgagattcactaaggtagttggatttttgtctgttttagggttggctgcggtttttccattaacggcacaagcagaaaaagccggaactgcgggggctggagaatgggataagttggggacttacacatatacttactcaagtccgacggtatactcgaccggaggagattttagagtgtgcctttcaggaagcactcctttttctgtttcactgcacttatatgaggatgatcccggtgacaatcctgatgattatgtaggggcaaactatttttcacccggagaatgccacacctttggcagtattggaaaatttgtagatgggagcaataacaaggccgagttctttgttaccgattactctggtaaatctaaaactgttacgttttatgattgatggactcaaattgtgaagtataactcttgggaaaaataaaaaagagagagatacctctctcttttttattcttcgacagctttacgaagccgttcatttacaatgccagtccagccgccatccatcttaccgcgaacgacggagcttttctcgtttgctttgccgatcacttcattcggctctttccagccgctgtgaataagggtaaaccctgtcttttcccccaagtcttctaattgaaaggtaacgacccatccttctgtatcccattcaaaagaaagttcagttggagcttgaacagccaaaactttacaaggggacggcccaaacggcgattgtaagtgaaattcttgtccttctttgagctgaaagtcattgggcataaaccacttggcaatgccttctgaagtagagactgtctcccagactttctgaatgggagcctccagggtaatgctttttgtaatatccggtaatgcattttcgttgttttgagccatttcgtttacctcttgacatatgatgtttttttcaattcaatcatataataactaatatgatcatgtccatagcgtgcattatttatgctagagctgctgttcaacagcgtgtcagttgccagtctgatctgtgaatgggagaattctgcatgttcgagaaagagagagatgtgtatgttgtcatttcgttcatgcttgtttgctcagccgcaacagttatgtttgaactggaattcctgttcagccaatttattttgcgatttttgttttaatagtaaatgagccattttctaaaacaggaggttttttatgcttggaaaaatcaaagcagccattgataacagtccagggaagccggccagaattatagttagtgaaaaagcgtttcagcaattagaggaagaaatgcgctttgtttacgtttccaaaccgaaaacgataatggggattcctgtggaagtttcagaacaggcagaaagcttcaagctggaattttagtttatcccagactgctaaaaggctcattttatgataattatgcaaaatggtcaggttggtttctttaaaagcatgatgaaatgttcatcatgctttttttatcgagaaaaaagacgaacataaaaaataggtatacgggaaaaataatcctattagagagaggggaactgacagatggataacatgatatcaacacttactgactggaatgtgtggtttcaagtgttaattgtatttctcgttccatatgtaatctataaagtgtttacttggattcatgtataagaaggtgcaatgatgaggtggcggagcaatcagtacaaaacacagaagcagcatatatcaggtcattcaacagctgaaaaggatcaggatgtgttaaccggtaacatcggatacgatttagaacatgtaaaaagaaaaataggacataacggggacgttcacttccgtgagcttgaaatcactcatttacatgtaaaagcggtattgatctttgttgaaggaatgtctgatcaggaattgattaataaaggtctatcagtgttagttatgaatcaacctaatcaggtaagcgatgaaattcaatccggcaaaggtactttaacttcgaaacagataaaaaatcaaatcatatcaatcggtgatgtcatagaatcagagaaaatcagtgatatcgtgttgaatgtgttcatgggttcgacagcgcttctcatcgatggaataccgcaggcctttcttctgggaactgtaaaaaaacaaaatcgaagtatcgaggagccgctttcagaagcgcttgtcagaggaccgcgcacaggctttacagaagagttgagtacgaatacagctcttttgagacagcaaggaaaaaatgatcaattaacattgcagagatttgaagtaggaacacgattaaaaaaggatttaatcatcgcttatatgaatgacattgcagatccaaaagtagtcgaggaagtaagaaaaagagtgagagggattgagatcgatcatttgccggagtcaggttacgttgaacagttaattgaggataattatttgagcccgttcccgcaagtacagagtacagaacgtcctgatcgcgtcataagcggattaatggaaggaagagtagccattctgcttgacggcactccgtttgctttgattgttccagtcactttcagcatgatgcttcaatcgcctgaagattattatgaacggtggttcccgagctcgctcatcagattgctgaggttcatcgcagcaatgataacgttattcgcacccgctttatatatatcatttatttcttttcatcctgggttaattccgaccaagctggcgatttcaatttccgggacgcgccaaggtgttccgttcccatctctgattgaagccttatttatggaagtcgcgattgaaattttaagagaggcggggcttcgtttgccaaaaccgattggacccgcaataggcatagtgggcggattaatcatcggggaagcagctgtgcaggcggggattgtcagtccaatcatggtcattgttgttgcgctcacagcaatttcttcatttgccatcccgcattatagcacaggtatagcacttcggatgcttcggtttggcgcgatgttttgtgcggcggtgtttggattgtttggagtcattatgtattatctgctgctaagcagccatgtcgtaaagctaaagagctttggtgtgccatacgcaagtccggcagtgccctatcacttaaaagattggaaagactttgttatcagaatgcctcttttagtcatgaagcgccggcctaaaatgatgaatacagataatacaaaacgggtgaagtgatgaactcgacaggatggtgataaagtctcatgttcagcccaaccagtaaaatcacaaccgctcaggcaacgattatcatcattaattatatgcttgctgccggagttcttacgctccctcggacagtaacagaacaaacacaatctcctgatggatggatttcagttttattaggcggggtcctagcggtaatagccgggatgatgatagttaaattaagccagcagtatcctaaggagaccttttatgaatactcccgacatattgtaggaaaatggctcgggcatctgatcagtattgtttttattacttattttctggcactcggtgcatctgaagtcagagtcatgtccgaaatcgtggatttttttctcctcgaagggacaccgtcttgggccatcattatgacagttctttggattgggctttattcaattacacaaggcctagatccgattgcacggctttttgaaatgatttttccgattacggtcatcatctttttaacgatagccctcatgagtttaggcatatttgagatcaacaatttgcgccctgtattaggtgatggaatcatgccggttcttagaggtgtaaagacaacgaacctttcatttacatgttcagaaattatgttcattttagtagcatttatgaaaaagccgaaaaatgcggtgaaagcagttgtgatcgggacaagcgttgtgaccagtttttatatgattacgatgattatggtcatcggtgcactatcagttgagggagttgtgacgagaacatggccggggcttgacctgatgagaagttttgaaatacctggtttaatatttgaacggtttgaatcatttctgcttgtgatttggattatgcagctttttgccacgtttattatcactttttatgcagcttccctgggagtctcacaagtttttaaaaagaaacccctttcatgtatgtttgggctgcttcctgttatatatatcctctcttgcatgccgaaaaatgaaaatgacgtctttatattgggcgatacggtcagtcatatcgctttgtatatatttggcgctttgccgattttgctgttagtcatttcgaaatggaggaaaagaggtgaaaagtaaactaaaacgtcaattgcctgctatggtcatagtatgtctgctgatgatttgcgtaacaggatgctggagcagtcgggaaatagaagatctcggtctcacattcgctatcgcaattgataaaggaaaagaaacgaacactgaaaaagagttaaaagaagagggcgggagctatccgaaaaaagacaacattacgctgacctatcaatttgttaatgaaaaagcggcaggcgcgggcacaagcgggggaggcggtagcggacaaggagcgcaaaaagcgtacattaatataagtgaaacaggggattcattacagcagatcggaagtgaggttgcattaagacgggaccgagaagtgtttagcccgcatttaaaagttgttgtcatgagtgaagatgtgctgcacacatttcctatcgacgaaatgctggatcaattttttcgtgataatgaaatcaggctgagttgtcttgttttatctgctaaaggggaagcaagagacgctctccagctgaaagagaacggagaaatcccggcttttcggctgattggattaggtgaaaatgaacataaagtttccagaatacttccccctataacactcgcgaaactaattggaaaactgcattctggcagcagttttttactgcaaaatgtggttgcggcaaatggagcggtcaagtattccggagcagctgtaatcaacggaaaatcgaaaaaaatgatcggcactttaaatgaatatgaaactgaggggattacatggattagaggagaagggaaaggcggagttgtcaaaagtcatgataaaaagagccaacagacattagcgtacgatatcaataaaatcaaaagcaaaattcagccaatcgtaaaagggaaagatatttcattccatgtcgatattgaatcagaaggcgatttggttgaaaactggaacacaaaagaggcgttggacacccagtttatagatcgtctcgaaacgactattgaaaacgaggtaaagaaaatagttggtcaggtattaaaaaaaattcagcatgattataaagcagatgttgcgggttttgatgaatcttttagacttacatatcctcacttatggaaaagggtgaaaaataactgggatgacaccttcagtaaagccgacatcacatacagtgtgaacgtcacaattactcatttcggcacggttaaaactcagtaatgaatcccaaggaagagaaggaaacctctcttctcttttttatgcattttttaggatgaagatactttttttggagagatatacacttttcaaatcgaccaatatgctaatataggaattgcttgaaatagaagggacaaggggctgtgaggcagaaaccgatttatgtagaaatcgaaatgaaatctgatctggatacactctgggaatatacacaaaacccatcactgcataaggaatgggatctccggttttcaaatattacgtatttgaatagtcagccatgcgaaaaacagaagtttctttacgaaacaagggtaggctttggattaaaggtgtcaggtacaggagaaaccgtcggtgttttcaacaaatgttcatctgaaaggtcttcttcactggcttttggctctgatcatccattatctctgattcggcatggaagcggctactggaagtatatacagagagaaaatgggaaaatgacgtttttaacacagtatcaatacaaaacagcctacggactgccgggaagatggattgatcgtttattatttcggccgctgcttggctgggcgactgcctggagctttgatgcattaaggctttgggtagagcaaaataaacatccgaagcgcttcattcgatctgctatcatctatgtgttcatgtgtctgtttttcagcctgttttggttctatcaaggctttgcaggtgttaagacaagcatattggcaggaacagcggagataggcttagctattttgtggctgcttcctttaaaaagaaaatggatcattcatggtgtccaggcttgtatttttgctgggtttgcttgtctaggttccgaaatattcatgtgggttctgttgagtgtgttttccgctgcaagcggcgctcttagcctgcagctccccagtgccaggcgcacaaaacgaaagagaaagaagtgacattgtgagttcgatttatgaaaaatcaattattaactatcatttgctgcatcccaagctgcagaaacggtaccaattagacgggtctcatacattcagcgggacgggaacgatgtcagaaataagcggaggctcttttctggttagaatgctgttaaagctgggtgtttttttcagatgcttcttttcagaaagaggcaaagacattccatttacaatacaaaatagaacttgtcttttgaaatcgcaacatacaggaatagaatggaatcgtacatttttctttaaaggcaaaaaacgtttctttgatgcgttaatgatatatgacgagaaagaaaatagaatacttgatttcttcggcaaacctcatctgctgctgtctgttttgacgttcgaggcatctcatgacggctctcttacgatcacatcgggaaagcaatggctattaatatgcggaaaaagaatcccgctgccgaaatggctgaccggtacatccgtagtttgcgaaacgtttgatgaaaaaaagaattgtttcaccattgaagtgcatgtgcaaaatacaattcttggcactcttttcttttataaaggaacgtttcaggaggaagagagagaatcatgaaacgaaatggcatagtcagtgcgctttgttttattggatttcttgcagcagaagcaccggatatttcagtggcagaggcactcgttttgttatccattctatttttcgtgccgggaatttttccttttgtttttcgtcaatctccggttcgtgctgctcagtttatggaatatgggctaatccagtggtatccggcagccgcattctttgcggtgctggctctagtgacggaggttgggggtttcgcacttatctggtggatgtacacagtttttattgcattgtatgcgatcctccgcctttgggaaacaaagatacatagaatcgaagagacatcagttttgttcggccttatttatttggcgggaggaggattttggttttttgcttatgctgcccatttgcagatcatgcaatttggccctctcatcattttgctgactgctgtccactttcactattctgcttttctgatcccgatcttcaacggtttactcggcagaaccattagaaaacatcggatgttgtacagttggataacatgggtgatttttctttcgccccttcttatcgcactgggcatcacatattcaaaaacacttgatgtcattgcggttagcatttatatggcggcgatttatcttcatgcatttttggtgttcacggcagcttttcgcaccaagacggggacatttcttattcggctttcttccgctgttttaatgataacgattgctttctcgatgatttattcatttggtgtatttcggcaagaagttacattgaccatcaatcagatgatttggattcacggttttgtcaatgcgtttggtgttatcttgcccgctctcatagggtggagaatagaggatgcgaaaccttttgatgcagacagtgtaaagacattcagccgtatctacggaaaaagaaagattggagaagaatttttagctaacattcaagctgaaaataacgctcggtacagcggacttgtggatgatatgggcagcctgcgttcaaaagatttttcaccagaaaaactggagccgctcattctttcgttttatgaacaaaccatcgaatacaatattaaagcaaaagtaacatggagcacgtggtttcggccgcttgcaattatttacgaatggttcagcagaagaatcggccaaatacatctttcgacgaaccctgactggtataggatgtacagcaagataagaggtgttcattctaaaaaagacggaagggaaagagtacgtgcctggattagaacaaatgaaaaaaacgaaaccatttttaccgctctttattcagtgtatcgttcaaatggagaggggtatatgaatatttctttaccgcttccattcagcagcatgacaggtattttaaaaccatatcatcaccaggagaagctggttttaacaagcaggcggagaaaaagcagagcgggggatgagggaatttatctgcaaacaagagcgggaacttgtccgcttcctttatctgaaacctttctgatagaagctgcacatgacaacaaattaaccgctgttcatcatatgtggctgtttgaaataaaatttctaactgttcattacagcattacacatattaaccagcctattgaaagaacctaacacaaagaagaagcttcgtctgccagttgctgcatttcaaaattctgcaccgcatcaagacaggaaaggaagggtttatggtgttttatatcagtttatttctgattctttggctggctgcggggtttgcagtgggaatgaaacaagtgtatgtcgatcagctgtttgataaaactgtgatcgaaaggctggaaaaagaagcgaatgatcatggacaagctgaccggatgatcaaacagcgcgccctttatattgcagcagtgacattaagcgggtttatttctgtttattatgaaatgaaaacaatcccgcaaaggcgaaacataagaaaaattgaaaaaaacatcatgaaattaaatcaagtaaaaaaacgaagaatgaagagaaaataaaaatgcacaggccaaagggcaggtgcatttttgttttgtatggaaatgggggaggtggtgccagcttacttttcataaattcaaaaatgagaagaacagcgcccgggctaatggtatataatattgtgaatttaacaaaaatttaacaaggaggacgagagaattcgtgcttaagcctcaaagagacctacatcctgttgatttggacttagaggcggagtagatgaaaccggccaaagtatccctgctccgccgtttgctccattccttgaagcatgttgattgtaacatagccaaacgttttccatcaactattaaaattgtaaaattattgtttatttttatggtatttactccgatttcttcaatttctgctgaagatgtataccagaattttgaggaattaaaaaacaatgaagatccttctgattacgacgttgttacgaaagaaaacggaagccctgttcttgttttagccattcacggaggaggtattgaaggagggacaagtgaagtagcgagagagctcagcaaagagtactcgatgtatttatttgaaggcttaaaatcggcaggaaactcagtcctgcacattacgagcacgcactttgatgaacctcgggcccttaaaatgacgggaaatcatgaatatgtcatttcattacacgggtacgcagaagaagatcagcagatcgaagtcggcggtacagatcgcgtaagagcggcagatttagttgagaaattgcagcatgccggttttcctgctgtattgctcaatacggaccatccacatgcgggcgttagtccgaataacattgcaaataaatcaaaaacaggtttaagtatccagatagaaatgagcacaggctttcgaaagtctttgttcggcatcttttctttaaaaagcagagctgttactcaaaatgagaggttttataagtttacagaagtgatgttccgttttctcaaatatagctactgaaaaataggaggcgataagacagcctcctattctttatgcttctcattcgtttcgggaaacagctcgtccgcggcttccgtttgatactgcaacgtgttatctctcgctgacagttcatttcggaaattttcatcaagtacatttttcaataaataccgatgaaaaaagaattcaaaaacagtaagacaggcagcggaaaggagagctgctccaaatggtgagaaatcgtttcttgtttgggttaaaacaaatacccaaagaataacgaatgaaaggccaaagtcagccaatgaagctgtaatattgtttgttctgggtaagacgagcatgtcaccagaaagataggaaacaaaacctaagaaaagtgcaataaacatcacacttaagaaggatgcgtgatagactctgtccaaaatcacatataaaagggcgagagtgaaagcaatctttgaagcaagcgcaatgatatgtttcatttgaccacctaaattgttattttttgaagaaaattcttgggcgtaaacaaatgataaataatgcaattcaaaaccattcataatggtcatgttactattttaaacagtccgtttttgtttacactggtattttttttcagcagtatgaaactttcttatgaaaaaagacgtatatgtggatgatcagctttcaaggggggaatgatttgtggagataaaaggaatcaatcacttgctattttcagtttcgcatttggatacatcgattgatttttatcaaaaagtgtttgatgcaaagcttttggtaaagggaagaacaactgcatattttgacatgaacggcatctggctagcgcttaatgaagaaccagacatcccgagaaatgacattaagctttcttatacccatattgcttttacaattgaagatcatgaatttgaggaggtatcagctaaattaaaaagacttcatgtcaatattctgcctggcagagaacgagatgaacgcgatcgaaaatcaatttattttaccgaccctgacggccacaaatttgaattccataccggaacccttcaagacaggcttcgatattacaaacaagaaaaaacgcatatgcacttttatgatgaaacggccttttgacatcacacaccatatttcatataaggttaaatttaaagaagggtgttggtggagactttatgtttggagaaggtttctacccgattagttcaacgatgccatatcttttgaactgcacaagtgattccgtgaaggagaaattgaaatacatattacattttatatgaagaaagcgagctgttttaacagaaagatgaactaattagactgtgtactaaattttcagtatatttcaattacctcgccccttaataaatatgaaaccgtatccttccacgacctaaaaaatgaaacgtttttaagaagatggcgtctaatattttaaatgttcatattttgataaaagtttcctaaaggaaagaaaatttcttgacttcaacaatcttttggtggataattgtggtgtaaacatgatgttctttttcctcctattcaggctcgcacccaaaagtcagggcgagcctgctttttttgaacaacaaaccccctctccgtaaaggaagagggggttattttatgcatctgatagatcaatagattaatggacggttctgaacacgccaatcactttccctagaatgctgacattctgcaaaatgataggttccatcgttgggttctcaggctgcaagcgaatgtgggtatcctctttatagaatcgttttacagttgcttcatcatcttctgtcatcgcaactacaatttccccattgttcgctgtgttttgctgtttaacgatgacatagtccttatcgagaataccagcatctatcatactgtctcccataatctccagcataaatacatgctcgtctggaggaaccatgcggtctgggagcggaaaatattcttcaatattttctactgctgtaataggagatcccgccgtgactttcccgatgaccggcacattaacgacctggctttgcggaatgtctacttcttcatcaagaatttctattgctcttggttttgtcggatcccgtctgatcagcccttttgtttccaagcgggccaaatggccgtggacagtagagctggacgcaagcccgacagcctctccgatctctctcacggaaggcggatatccttttgatttaacctctgctttaataaaacggaggatatcaagttgcctttttgatagcttcgtcatttttcgcacctcaaaacgtcgattttaagaagattatagcatgattttccttacagtacaaacataggttcgaaaaaacaattgacagaaacgtttgttcgtatatactgaaattataaaaatgcgaacaaacattcctgttggaggttatgatcatgagtaaagaatctattatttttgtcggtctgttcacagtgattttgagcgcggttatccttatgctgtcatatacaagcagcggccaagagcttaatcagtatgttaaaatagaagtccagcaaggcgacacactctggtcaattgctgatcaggtagcagatacaaaaaagataaacaaaaatgattttattgaatgggtagctgataaaaatcaacttcaaacctctgatatccagccgggtgatgagttagtgatcccattgaaaaagaagcatcaggatgcatatgaattagcaactgtaaaatagagaggaaagagagataaaatgaaagcactcatttatgcccgtgtaagcacaaataaagaacagcaggaaacgtcattaaagcggcaggaggaggagcttacggccattgcagcggagaacggtatggaagtggtcaaagtgattttagaaaaagccagcggatatgaaatggatcgggatggtgtatttgagctgcttgatgagattaagaacgctggaattgatgtcattttggttcaggatgagacaaggctcggacggggaaacgcaaaaatcgcactgcttcattgtatttatagagaaggtgtgaaagtctatacaacggctcatagaggtgaactggagttatcggaggctgactcaatggtcttggaaatcgtcagcattgtggaagagtatcagcgaaagattcacaacatgaaaatcagacggggaatgaaacgtgcagtaaaaaacggttttaaaccgcaaaaaaacttaaaaaaccaacatgggaacagtggaaaagaaaaaatagaggtgccaatctctgagatcgtccgcctaagagcgaataaactgacgtttgctgaaatcgcggctaccctaagagggtttggctatgatgtctctaaagcaactgttcaccggcgttttcaggaatacatagagaatgaagagacagcagagtgaatcagttgtaaaactttttttgatctagtactatatagacaaaatgcaataaaggagtttaacatgatttcaaacgcgaaaattgccagaattaatgaacttgctgccaaagctaaagctggcgttattacagaagaagaaaaagccgaacagcaaaagctccgtcaagagtacttgaaaggttttcgttcttctatgaagaacacgttaaaaagtgtgaaaatcattgacccagaaggcaatgatgttacaccagaaaagctaaaaagagaacaaagaaataacaaacttcactaatataagaggaatacggcaatatcgtattcctcttttgcatatactataatcaaaactcttatgtgacaaaattcaacaagtttctctcaaatttaagctgaaacagttgagaaaaagtcgtcagacatttatgatgtaagggtacaacacataaggaaggggatttttatggatacaattgaaaagaaatcagttgctaccattcgcacactgtcaatagacgctattgaaaaagcaaattctggtcacccagggatgccgatgggagccgctccaatggcatacacgctgtggacaaaatttatgaacgtaagtccggcaaaccctggctggtttaaccgtgaccgttttgttttatctgctggacacgggtcagcactattatacagcatgcttcatttaagcgggtttgatcttagtattgaagatcttaagggattccgccagtggggcagcaaaacaccaggacatccggaattcggacatactgccggtgttgatgctacaacaggtccgcttggccaaggaattgccatggcagtcggtatggcaattgctgaacgccatttagcggaaacatacaaccgcgattcatttaacgtagtcgatcattatacatacagtatttgcggtgatggtgatttaatggaaggtatttcttctgaagccgcttcactcgcaggccatcttcagcttggccgtctgatcgtactatacgattctaatgacatctctcttgatggagacctcgaccgttcattctctgaaaacgtgaaacagcgttttgaagcaatgaattgggaagttctttatgttgaggatggaaacaatattgaagaattaacagcggctatcgaaaaagcacgccaaaatgaaaagaaacctacattaattgaagtgaaaactacaatcggattcggttcacctaaccgtgccggtacatccggtgttcacggtgcgccgcttggtaaagaggaaagcaaattaacaaaagaagcttacgcatggacatatgaagaagacttctacgttccgtcagaagtttatgagcatttcgctgcagctgttaaagaatcaggtgagaaaaaagaacaagaatggaatgctcaattcgctaaatataaagaagtttatcctgaacttgctgaacagcttgaactggcaatcaaaggagagcttccgaaggactgggatcaagaggttcctgtgtatgaaaaaggaagcagcctggcatcccgtgcatcttccggtgaagttctcaacggacttgcgaaaaaaattcctttctttgtcggaggttctgctgacctagcgggatcgaacaaaacgactattaaaaatgccggtgattttacagcggttgattactcaggcaaaaacttctggtttggtgtacgtgaatttgcgatgggtgcagccttaaacggtatggcgcttcatggcggtcttcgtgtattcggcggaactttctttgtcttctctgattacctgcgtcctgcgattcgccttgcagcgttaatgggccttcctgtgacatatgtcttcacacatgacagtattgcggttggtgaagacggtccgacgcacgagcctgttgaacagcttgcttcactccgtgcgatgcctaacctttctttgatccgtccagcagacggcaatgagacagcagcagcatggaagcttgcagtgcaaagcactgaccacccaacagcgctagtgcttacacgtcaaaaccttcctaccatcgatcaaacagctgaagaagcattggcaggagtagaaaaaggtgcatatgtcgtttctaaatctaaaaacgaaacacctgacgctcttctcattgcctccggatccgaggtaggtcttgcaattgaagcgcaggctgaattggcaaaagaaaatatcgatgtttctgttgtcagcatgccttcaatggaccgttttgagaaacaatctgatgaatacaaaaacgaagtccttcctgcagatgtgaaaaaacgtcttgcaattgaaatgggctcatcatttggatggggcaaatacacagggcttgaaggtgacgttctcggcatagaccgattcggtgcatctgctccaggtgaaaccatcattaacgaatacggcttctcagttccgaacgtagtgaatcgagttaaggcattaatcaataagtaagcttttgaaagaggatgagtcaaatcatcctctttttcttgtttatccgacaaaaatagtattggctgtttaacagtaatagacaattctttcttttcttcttttgtataatagagagcaaatgaaatgctgctggaaaaggggatgaaaagatggaacgtcactactatacgtacctgatcaaagaggaatttgccaatcactatttcggccgggaatcggttatgtttgagctgtttcaagactatcattggacaagccttgaaaagcagcagtatgaaatgacagagaaacagattcaatatattacacaaccaatcccgattttacatatgcatcagcggttaaaaatgaatttaaacaagacggattacaggcagctggattatatttatagaatagctttgccgaaagcaaaaggccacgcgacgtttatgatgaaggagcacatgatagaaattgtggcttcgggagattacgaggcagaaacgatattctttgaagtgttaagaaaagtaagcccttgctttttagcaatggatttcaattcgaagcgttacggatggctaaatccggtgaaagaaagaaattttgtctaaaaccgaagaaaaagagatgtaaatgttgtataatagcttttggtttagtacactttaaactagacaacatgaaggaggaaataaaatgactttatgggttggcatcctagtgggcgttgttgcattgctcataggtgttgcactcgggttttttattgctcgtaaatatatgatgagctacctgaaaaagaatccgcctattaatgaacaaatgttacgcatgatgatgatgcaaatgggaatgaaaccttctcaaaagaaaatcaatcaaatgatgaaagccatgaataatcaaacgaaataatacgtaaagattatgatatagagaaacatggttataaaataaaaaacccttatacgggttttttattttgcaatcattcatcacccgctactgctcgaaggcgctgcttttgatattgtatgagaagatggtcaagctcctgactgagctctatcgtaatatgagatgtcattccgttcgccatgacaatttgcagcagctctgctctttttttttcaatttcttttaatagatgctctctaatcacagggatgtatcctttcatacattagatcttcaaagtgaatgtttatattatatccatatttatactaattttcaaatgagaaggagtataatgtctcaatgtcaaattaaattatataagttttttctgaaaatagaaatccttcaagtgaaagtgttaaaaaaatgaaatgattttgtcataacttgaaggaatgtcaaatcatgaagggatgatgacatgggagacgtgaattattttttgacattcggtgcgggttttttatcctttatttcgccttgctgcctgccgctttacccagcttttttgtcatatattacaggggtcagcatggacgatgtaaaaacagaaaagctgctgctgcagaaaagaagcctgtttcatactttgtgttttttgcttggcttttcagtcatttttattgctttaggctatggaacatcttttattggcagcctgtttagggattatcacgatgcgattcggcaaattggcgcgttgcttattattttgttcggtttcattacactcggtgtgttccggcctgaggctatgatgaaagagcggagaatccattttaagcataaaccaagcgggtttttaggatcggtcttaatcggaatggcatttgcagctggatggacaccatgtaccggtccgatattaggtgctgttatcacacttgcaggcaccaatccgggctcagcggtgccatacatgatgttatatgtactcggtttcgcggtaccgtttcttttattgtctttttttatcacaaagctgaagtggataaggaagaaccagcttttcattatgaaagctggcggcgttttgatgattgtgattggtgtgctgttattctttaattggatgagcctgatcattattttgctgtcagatctttttggaggctttactggtttttgacggtaaattactttcgtactactactaatccttttgtttttggtacaataagactattatctgtggaaatcgattgttggaggggaatatgacaagagttttagttgtagacgacgccaagttcatgagagtgaaaatcagagagatcttggaagaggcaaattacataatcgcaggcgaagcggcggacggtgaacaagcagctgacctgtataaaaaactgcgcccggaccttgtgacaatggatattacaatgccggtgaaaaacggcataaaagcgcttcgtgatatcttaacctttgatcctaaagcgaaggtcatcatgtgcaccgccatgcgccagcaaagaattgtaacggaagcaattgagctgggggcaaaggattttattgttaagccgtttgaggaaacaaaagtgctggaagctgtaagccgcgttatgggacattaaagtcatttcttttcaaaatggttttttttattgttttggagtatagtatatagtatcaacactccgagaaacaaaggaatgataagtatgatgattatagtttcatcgattattgctgtgttaatggctgtagctgtgatggtggtcagaataaagtcctctgacaagcctgtttcaccaaaaaaaatcattctcccgccgatttttatgagtacgggagcgttaatgtttttatttccggtattttgggtaactggtgcagagtttttggaagcattcactttaggtgtgattttctctatttttctaatcaaaacttctaagttcgaaattaaaaataatgaaatttacatgaaacgctctaaagcatttgtttttatattagtcggtcttttggtgatcagaatcgtgatgaaatcgatcttgagcacatcaattgattatggtgcactgagcggaatgttttggattctggctttcggtatgattgtgccttggagaatcgccatgtatttatcatatcgaaaacttcataacgagctgcagtcatctaatattcaaatgaattaaaaaacctttcctcttgtcaggaaaggttttttatttgagaagggtctgataaggttccaaatcgatttttttgtcccgcagatgcctttttaagaaggtatggtctcttttaggagttgcgagaatatagcctttgatcataagttgctgatcaatctttgctaccttttcttttaatgcaagctcaccgattttgcctgcgattttagcttttgctgcatctctgaacagctctggcacgggcgcagtcaattcatctagaaactgtttgttttcatcgttccataaatgtctgctgttttcaatatagtaatcctgccaatcaagctctgatctgccgtcctcttttggtaaacgctttaaaaactttcgaaacatgaaaaaaccgccgattgataataagactaccatcatgatcacccaaaacagaataaaccataaaaaccatccttccagcatcaatcattcccccttattctaaccatattgtatacgaagagagattagaagaacacagtaaaaaaagaatagaaaaaagtgatagacgtctagtcaaaagagatagtagatcatattctattgtatagtgaatctgctatttggccatgggagagtcactagagggtatttgacgataaatggacggaaaaaaaagtcactttcataataggggatgaaagtgactttttatgtttagctgagaggaaattgaagagaaaaagaagagccatcttctgtttctttattgacggcgactgtgagtatttgattttcgcattcggcttgaatggttttgtcattaaaataaaaaggaagcatcatttgtttttcaaaagtctgtcctgacgatttgactgttaagatgaactcgcatccagaaagggtaactgttacttgtgtaggctgtaaaaaagtcagatccgcttctataatatactgctgacttgtttcatataaatcaataggcaatgtttcgtcgtaccaggcgaaggggtcttcaaaaaattgccgaagccattcatccatactatcgaaatcattcgcatcgttgcgttttgaatggttcatggaagcattcctccacatatcaaccttgctttacatcatatgcggtggattataaatgggtgaacgcataaaaaaacagacactaaggtctgcttttcttacatatcatggcttgagttgtgcttttgtcttgtatggtttcggttctttacttttttgcttccgcttagaggctcaggttggccgggattgtgtcctttaggggcgtttttatgcatatctttacttgtattcttattggtcataaaatgagaacctccttaaaagagttcggtgttattgattggtttttctttttttgttattttggcgttctgcttcagtcagtacaagctggtcgttttcaatatagccggcgcctttgccttggctttttgcgtcattcattccgttaatgacgtgattcgcttttcttttgaccatcattatcacctcaatcataatatggcttcttttattgtgttatatgagagagcgtaaacagtaaaaattaccggtacatttttctcataagtcgaacttattgtatttaataaaaacattgatatttacttatgtatgattttgttttaatatgaaattgtgagaaaattgtgatggaatgtaatgttcatctgagaatgatctgatctgaagggggattttggagaatggcaaacgagcaaaaaactgcagcaaaagacgttttccaagcgagaaaaacgtttactacaaatgggaaaacatatcattactactctttaaaagcgttagaagattcaggtataggaaaggtttcgaagcttccttattccatcaaagttcttttagaatcagtattgcgtcaagttgacggcttcgttatcaaaaaagaacacgtggaaaatttggcaaaatggggaactgccgaattaaaggatatcgacgttccgttcaaaccgtctcgtgttattttacaagacttcacaggggttccggcagtagtagatctggcttcactgcgtaaagcaatggcagctgtcggcggagatcctgataaaatcaaccctgaaattcctgttgatcttgttatcgaccactctgtacaggtagataaagcgggtacagaagatgcattagcagtaaatatggacttggaattcgaaagaaatgcagagcgctacaaatttttaagctgggcaaagaaagcgtttaacaattatcaggcagtaccgcctgcaacaggtattgtgcaccaggtcaaccttgagttcttggcaagtgttgtccatgccattgaagaagacggcgagcttgtaacgtatcctgatacgcttgtcggaacagactcacacacaacaatgattaacggtatcggtgttctcggctggggtgtcggtggaattgaagctgaagcgggaatgcttggacagccttcttacttcccagttccagaggtaatcggcgcgaaacttgtcggcaagcttccgaacggaacaacagctactgacttggcgttaaaagtaacacaagtgctgcgtgaaaaaggcgttgtcggtaaatttgttgaattcttcggaccgggaattgctgaactgccgcttgcagatcgcgcaacaattgcgaatatggctccggaatacggtgctacatgcggattcttcccagtagatgaagaagcgcttaactacctgcgcctgactggccgtgatcctgaacatattgatgttgttgaagcatactgcagaagcaatggcttgttttacactccagatgcggaagaccctcaatttactgatgtggttgaaattgacctgtctcaaattgaagcaaacttatcgggtccaaagcgtcctcaggatttgatcccgctatctgctatgcaggaaacgtttaaaaagcaattagtcagccctgcaggtaaccaaggattcggtttaaatgctgaggaagaaaataaagaaattaagtttaaactccttaacggcgaagaaacagttatgaaaacgggtgcgatcgccattgctgcgattacaagctgtacaaatacatcaaacccatacgttctgatcggcgccggactggtagcgaaaaaagcggttgagttagggcttaaggtgcctaattacgtgaaaacgtcacttgcaccgggttctaaagttgttacaggatatcttgtgaattcaggccttcttccatacatgaaagagcttggctttaacctcgttgggtacggctgtacaacatgtatcgggaactcaggtccgctttcaccggaaatcgaagaagcggttgcgaaaaatgatcttctgattacgtctgtcctttccggaaaccgtaactttgaaggacgtattcacccgcttgttaaaggcaactatcttgcttcaccgccgcttgttgtggcatatgcgctggctggaacggtaaacattaacttaaaaaccgatccaatcggtgtgggcaaggatggtcaaaacgtatactttaatgatatttggccgtcaatggacgaaatcaatgcacttgttaagcaaactgttacgccagagctattccgcaaagagtatgaaacagtatttgatgacaacaagcgctggaacgaaattgaaacaacagatgaagctttatataaatgggataacgattcaacttacatccaaaacccaccattctttgaagagatgtctgttgagccaggcaaggttgagccattaaaaggactgcgtgttgtcggtaaattcggcgattcagtcacaactgaccatatttctcctgcgggggcaatcggaaaagatacgcctgccggaaagtatttgcaagaaaaaggtgtttcacctcgtgactttaactcctacggctcccgccgtggaaaccatgaagtcatgatgagaggaacatttgccaacattcgcatcaaaaaccaaatcgcaccgggtacagaaggcggatttacgacgtactggccgactggtgaagtaacatccatctatgatgcatgcatgaaatacaaagaagataaaaccggtcttgtcgtattagcaggaaaagactatggtatgggatcttcacgtgactgggctgcaaaaggaacaaaccttctcggcatcagaacggtcattgcagagagcttcgaaagaattcacagaagcaatcttgtattcatgggtgtgctgccgcttcagtttaaacaaggtgaaaatgcggatacactcggcttaacgggtaaagaagtcatcgaggtagatgttgatgaaacagttcgtcctcgtgaccttgtgactgtaagagcaatcaatgaagacggcaatgtaacaacttttgaagcagtcgtccgctttgatagtgaagttgaaattgattactaccgccatggcggcatccttcaaatggtgcttcgtgaaaaaatgaagcagtcctgatgaatcaataggaagagaaggcatttcgctttctcttctttttataacacaatgtgctgcggaggtggcatatgctgaaaaaatggctcgcagggatcctgcttatcatgcttgccggttatacgggatggaatttatatcaaacatacagcaaaaaagaagtcggaattcaagaggggaaacaagcacctgatttttctttgaaaacgctgtcaggagagaaaagctctttacaggatgcaaaaggcaaaaaagtgctgctcaatttttgggcaacttggtgtaaaccgtgccgtcaggaaatgcctgcgatggaaaagctgcaaaaagagtacgccgacaaacttgcggttgttgcggtaaatttcacttcagctgagaaaagtgagaaacaggtccgagcgtttgctgatacgtatgatttaacattccccattctgattgataaaaaagggatcaatgctgactataacgtgatgtcatatccaacgacatatatcttagatgaaaaaggtgttatccaagacatacacgttggcaccatgacaaaaaaagaaatggaacaaaaactggatcttgattagattcagtttttttatgctcagatatgcttacaagttttcagaattggaaaaaataaaagaatatgcggaggtgagaagcgtgaagaagatgagaaaacgttcttttcatgagctcgtcatggaaaacaaaaaagagctgatgaccaatacagagtatttaaatcagcttgaggaaaagcttgaacagcgatttaagcaaaaataacctttaatttgtattcatgtttacccctccttttgagaaacctatctgttgaggagggataaacatgggaaacaacaagaaaaacggtcagcctcaatatgctccaagccacttgggtacaaagcctgtaaaatataaagccaataaaggggaaaaaatgcatgatacttcaggacagcggccgattatcatgcagacaaaaggcgagtagcgaaaattcgagtttatttctaggaggtacatccgaatgacaaagaaccaaaatcaatatcagcagcctaatcctgatgatcgctctgacaatgtggaaaaattgcaggatatggttcaaaatacaattgaaaatatagaagaagcagaagcatcaatggagtttgcttcaggagaagataaacagcgtatcaaagaaaaaaatgcaagacgcgaacagagcattgaagcgtttcgtaatgaaatacaggacgaatctgcagcgagacaaaacggataccgttcttaaaaaaccagggaaacctggtttttttctttctgatttgattatggtaaaatggggctaaattgacgttaagggagcagagtaatcttgcatgtatcaaaaaaagaaatagaagtgcgttatgcagaaacagatcaaatggggattgtctaccacgcaaattatcttgtgtggatggaggtcggcagaacggccttaattaaggacttaggctttttatatagtgatatggaaaaaagaggcgttctgtccccagtcgttgatatcaatatttcctataaaaagccgcttcattacggagaaaccgcggttgtacatacatggatagaggaatataacggatttaaaaccgtctatggttaccacatctataatccggccggtgagctttccatcaaagccacctcatctcatatttgtgtggataaagaaagctttaagccaattcaattccgcaaagcttttcctgattggcacacagcatatgaaaaggccaaaaaatagggaagtgaacgggatatggcgtttggtgtgaaacgggaggaacttaaccgatggaaacaagcagtgaaaagaggagaaatcgcatttttaacacattactggctggatgaccgatttccggaagcaaggactgtaacaaaagccggctgtgcagacattgataagctggttcagtggggggcggcgtacgggttaaaaaaagaatggatccataagaaaagtgaatttcctcacttcgatctgctgggggaaacacaaaaatatattttggaacaagaaaacctaaccgatcatcttatacgatttcatttgtaaaaaaagaacgcacatgatgtgcgttcttttttattggtattcaaaaaccggttcatcagcgtcttctgaatagctgacgagaaggtcgtggttatcaaagtaccataaatcactttcttcaataaagaaggtaatgccgtcagcttctgcagtgactccagcctcttgtggggcatctttcgctacaccgagagaaaaacccttttgaacgttgctgcagcctccatagcggacgaaaaagcgaacctggtctccgctttccaaatcgagttcttctttataccagttcaatgcgtcttcgttaattgtcatattcataacagaacacccctttgttcttcatttgaattttctctattataaacgtattaggctattctgtgtcaaaagagaagttttttaagcttataaccattttactttaggttctgttttattgataattcgtttaatgttcgctcggtgtctgtatatcacaaaaatagtgagcagggtaacgacaatcaataaatacgtatcatggacaaagaaactatatataacagtatagatccctgttaacatcgatgagagagaaacaaatttagtcaagtataaaaagatgaagaataccgcaaccatcgtgataaataacaggggtgcgtaaaatagcaaaacgcctcctgatgtcgccacggctttaccgcctttaaatttggcgaagatgggaaacacgtggcctaaaaccgcaaagactcctgcaagaagcgggtgaatatcaacatgcatgagaaaaggcaatgcagttgccagtgtccctttcaaaatatctccggctatgacgaccgaaccagcttttacacccaatgtacggaatgcattggtagcgcctaagttgccgcttccgtgctcccgaatatcaattcccttggcaagcttgcccacaattaagccagatggaatgctgcctatcaagtaggccaaaataatcaataaagcaattaacatctacatttctcctttttcaaattcccttctttttattttaacatgagatgtcatgatctgatgataagtttttttgtaaagtttgcttacaaatccaatcaaacatgcatcatattttgatttctcctgttttgatcgtgtaaaataagtaaaaaaggagtgacacacgatgcaaaacccttctaaagcggaaattaaagagattcttcaaagaagcaaacgtatagcggtagtagggctttcagaccgtccggatagaacatcacatatggtttcaaaagcaatgcaggacgcgggttatgaaattatccctgtgaacccgacaattgatgaggccctaggtgtcaaagccgtttcatctttaaaagagattgacggtccgattgacatcgtaaatgtattccggcgctcagaacagcttcctggagtggcggaagattttttagagacagatgcgccagtattttgggcacagcaagggctagttaatgaggaagcataccagatgctaaaagaaaaaggcagaacggttatcatggatctgtgcataaaagtggcacacgctgtaacaaaataggtgcagaactgcaaaaatccttgtaaattcaaggatttttgctttttaattttaagatattgtttgcgtattacggtgaaacagatacaataaagcttgaacagctttttttgaataccttgtccagctgggtttcggccgttcgatttgcgaaggtctgctgctttatatataataaacaaacatacgttcttatggtgtaaaaacagcactagccgatgttttgagaagaactgattcgttagctctatgttgcgattgcaaacatattggttataatgaggagtccaaggcagtactggctcgaggcgaggtttataaaaaatatcttatatacaaatgatgtgtaacactgaaaaagagaaagacaatgttagtttttgaaaggggtttgtacgtttggctagaaaacagcaatttgattacaacgaagatgccatacaggtgctcgaaggccttgaggctgtcaggaaaaggccgggtatgtatattggctctactgacgcgcggggtttgcaccacttggtttatgaaattgtagataactctgtcgacgaggtgcttgccggccatggagatcacataatcgtcaaaatacataaagacaatagtatttctgtacaggatagaggccgcggcatgccgaccggaatgcataagctcggcaaaccaacccctgaagtgattttaacggtgcttcatgccggaggaaaattcggccaaggcggctataagacaagcggcgggctccacggagttggtgcatcagtcgtgaatgctttatctgaatggctgacggttaccattgagcgggacggttttgtctatcagcagcgatttgaaaatggaggaaaaccggttacatctctcgaaaagatcggcaaaacaaaaaagacgggaactcttacacactttaagccagatccaacgatgttcagcacaaccacttataattttgaaacgctctctgagcgcttaagagagtctgcgtttttgttaaaaggactgaaaattgagctgattgatgaacgcaatgaccagcatgaggtcttttattatgaaaacggcatagaagcgtttgttgcttacttaaatgaagaaaaagacgtcttgtctgaagtggtctcgtttgagggtgagcatcattctatagaagtggactttgcgttccagtttaacgatggttattctgaaaatattttgtcgtttgtcaacaatgtcagaacaaaagacggcgggacgcatgagtcaggtgcaaaaactgcgatgacgcgtgcttttaatgaatatgcgcgaaaagtggctttgctgaaagaaaaggataagaaccttgaaggcaccgatataagggaagggctttcagccattatttctgtccgcattcctgaggagcttcttcaatttgagggacaaacaaaaggaaagctcggtaccagtgaagcaagatcagcagttgatgcgattgtttcagagcagcttgcttactttttagaggaaaatcgggacaccgcaacgcttcttgtcaaaaaagcaatcaaggcgagccaggcgcgcgaagcggcacgcaaagcccgtgaagaagcaagaagcggcaaaaaacgaaaaaaatcagaagcgactttaagcggaaagctgacgcctgcgggttcaagaaacccggcaaaaaatgaattgtatctcgttgagggagattcagcaggcgggtcagccaagcagggaagagaccgcagattccaagcggtactgcctttacgcggtaaagtcattaatacagaaaaagctaagcttgctgatatctttaaaaatgaagagatcaatacgatcattcatgcgatcggcgggggagtcggggcagatttctcaatagatgacatcaactacgacaaaatcatcattatgaccgatgccgatactgatggcgcccatattcaagtgctgcttcttacctttttctatcgctatatgaaaccgctcattgagcatggcaaggtgttcattgcgctgccacctttatataaggtcagtaaaggaagcgggaaaaaggaaatcattgaatatgcatggtctgatgaagagatgggtgatgtcctgaaaaaagtcggcaaaggctataccattcaacgatataagggtcttggagagatgaacgcagaccagctgtgggaaacgacgatgaatccggagtcccgcacacttgttagggtcaaaattgacgatgcggcacgtgtagaaagacgtgtgacgacgttaatgggagacaaagtagagccgcgcagaaagtggattgagaaaaacgtcgctttcggcttagatgaagaaagcaatattttagaaaatgaaaacttatcggtcgctgaggaggtttaatgattgtcacagccagaattatttcatgatttaccattagaagaggtgatcggcgaccgttttggacgctacagtaaatatattattcaagacagggcgctgcccgatgcgagagacggattaaagccggtacagcgcagaattctgtatgcaatgcatacagatggaaacacgtttgataaaaacttcagaaaagcggccaaaacggtcggtaacgtcatcggtaactatcatccgcacggtgacagctcggtttatgaagcaatggtgcggatgagccaggattggaaagttcgtaatgtgttaatcgaaatgcatggaaacaatggaagcatcgacggagatcccccggcagccatgcgttatacagaggcacgattatctccgattgcatctgagcttcttcgggatattgacaaaaacacggttgaatttgtgccgaacttcgatgatacaagcaaggagcctgtcgtactcccggcgatgtttcctaacctattggtcaacggatctaccgggatttcagcaggatacgcgaccgacattccccctcatcatctgggagaagtcattgatgctgtcattaagcgtattcaaatgccatcttgctctgttgatgaacttatggaagtcattaaagggcctgattttccgacaggcggtattattcagggcgttgacgggataagaaaagcttacgaaaccggaaaaggaaaaatcattatccgcggaaaggctgaaattgaaacaatcagaggcggacgagaacaaattgtcattactgaaattccatttgaagtaaataaagcaaaccttgtaaaaaaaatggacgagttccgtattgataaaaaggttgaaggcatctcagaggttcgtgatgaaacggatcgaacagggctgagagtggtcattgaactgaaaaaagaagctgatgccaaaggcattttgaatttcttatacaaaaatactgatttgcagatcacatataacttcaatatggtggctatccataaccgccgtccgatgctgatgagcctgccgtctattttggatgcatatatcggacaccaaaaggaagttgtcacaaaccggtccgtttatgagcttcaaaaagcaaaagacagacatcatatcgtagaagggctcatgaaagctttgtctattttagatgaagtgattgcaacaatccgttcttctagcgataaacgtgacgctaaaaacaatttgatcgcgaaatatgaatttacggagcctcaggctgaagccatcgtgtcattgcagctatatcgtttaaccaatacagatattacagcgcttaaggaagaggcagaagagctcggtaaaaaaattgaagagctcgaatctattctgagcaatgataaaaaactgctaaaagtgattacaaacagcttaaaagcattgaaaaagaaatatgcagatacgagacgctccgtgattgaagaaaaaattgaagaaattaaaatcaatctcgaagtcatggttgcatctgaggatgtatatgtaaccgttacgaaggatggttacctaaaacggacgagccagcgctcatttgccgcttccaacggtcaggacttcggaatgaaagatacggacaggatgctgcatcagtttgaaatgaatacgacagacgtgctgctgctctttacgaacaaaggaagctacatctattgtcctgttcaccagctgcctgatatcagatggaaggacatgggccagcatttttcaaatctgatcactattgaccgtgatgaaacgattgtaaaggccataccgataaaagaatttgatccgtcggcatatcttctattctttacgaaaaacgggatggtgaaaaagacagagctcacccattataaagcacagcgttattctaaggcgcttgtggccttaaatctgaagggtgaagatgaactgattgatgtacatgtaacaaatggggaaagccagatctttatggccactcacttagggtacggcctatggtttggagaagacgaagtgaatgtagttggcgcacgtgcggcaggtgtcaaagggattaacttaaaagaggatgactttgttgtctccggtgagatccttcagcaatctgattcaattgtcttgttcacacagcggggagcggtaaaacgcatgagtctttctgagttcgagaagacatcccgcgcaaaacgcggtgtcgtaatgctaagggaactgaaaaagaatcctcaccgtgttgtagcactgttcgcttgcggtcttgaacagcgactaatggcagaaacagaaaaaggcgacagaaaagaactgcaggcaaaagagttgcggacaaacgacagatacagcaatggctctttcttttttgatgaagaggaatcaggcaaggttacagctgtttggcgacttcatacagaacaataataaaaaacccgctcatatagtatgagcgggtttcgtttgttttttatcagctttcatggttggtgaatagatctgttacagcatgaatgacttcaatcccctgccatacaaataaattcagcgctgtgaaagaaaataagcctaaaatcaccattcttaagataaacaacatgtttaacagcctcctcatattttcgttacataatcgggtgatgttgaacatgaagtttgccgaaataagacgattgataaaatttggccagtataaagctttttttccgctgacgtctgcgggagtatcccgtacttttgctttcagcggtcagcagcagaacagccattgcccataaagcggtcagcgtaaatgcccctgtgatggatttcttctcatcatcagcattttggccgactttcatctcatgcatttcctgctggtcggctacggctttataatgatggccgatatcaaaggcgtggggaattgagaacaaatgaaaactggcaatcgccaagaataagatggatgctttcaatatcgttacttttttcaaatgatctccccctcctttaatattactgaatatttttataataataccccaatccatcctaaaagtaaacgtgatttattaaatttaaaaataaatttaaccttgttaagtatatatctttttgcttatttttgaaagagaaaacttcttttattagcgtatgtatacccggtttatggtgtgaataaaaacatattttaaatgatatgtttgttgtttagggtttattactttatttatgtgttaaatcaaagggaaaggcaagagaatgggaagaaatgattacattgttaatagggcactcttttttaaaagccagcttgcaaggaatgtttttattcgtaggaaaataatagagaaggggtcgacagagtaacatctggctacgacaatattcttctcgaaaaaacttcctaattcgtcatattgtgatataataaaactcgttatgttaaaaaatctaacatcaaaatcgaattcgtgttgaattgatgaaaacgggaggtaaatatggagtcttttttcaatagtttgattaatattccaagtgatttcatctggaaatacctattttatattttaatagggcttggattattttttaccatacgttttggttttatccaattccgttattttattgaaatgttcagaatagtaggggagaagccggaaggaaataaaggtgtttcatctatgcaggcattctttatttcggccgcatcccgagtcggcacagggaatttgactggtgtagccttagcaattgcgacaggcggaccaggcgctgtattttggatgtgggtagtagctgctgtaggtatggcttcaagttttgttgagagtacgttagcgcagctttataaggtgagagacggggaggatttccgcggaggcccggcctactacattcaaaaaggtcttggagccagatggcttggcatcgtttttgcaatcttaattaccgtctcattcggcttgatttttaacgctgttcaaacaaatacaattgctggagcattggatggcgcattccatgtgaataaaatagttgtagccatagttctggcggttttaactgcgtttatcattttcggcggtttaaaacgtgttgtcgctgtttcacagttaattgtgccggttatggcaggcatttatattcttatcgctttatttgttgtcatcacgaatattacggctttccctggcgttatcgctacaattgttaaaaatgctttaggttttgaacaagtcgtcggcggcggaataggcggcatcatcgttatcggtgcgcagcgcggacttttttcaaacgaagcaggaatgggaagcgcaccaaacgcggctgcgacggctcatgtatcccatccggcaaagcaaggctttattcaaacattaggcgtatttttcgatacatttatcatatgtacgtccacagcatttattattttgctgtacagtgtaacaccaaaaggcgacggcatccaagtaacacaggctgctcttaaccatcacattggaggctgggcgccgactttcatcgcagtcgcaatgttcttgtttgcattcagttcagttgtcggcaactattattatggcgagacaaacattgaatttattaaaacaagcaaaacatggctgaacatttaccgtatcgctgtaattgctatggttgtgtatggatctttatcaggcttccaaatcgtttgggatatggcggacctctttatgggtatcatggcgctgatcaacttaattgtgattacgctgctgtcaaacgttgcttacaaagtgtataaagattacgcgaaacaacgtaagcaaggacttgatcctgtgtttaaagcgaaaaacatcccagggctgaaaaacgctgaaacatgggaagatgagaaacaagaagtataatataaatataatgaaaaagctgcattcaatagttgaatgcagctttttcattattggaaataaatttaatttttcgactcgaatgaaaaatgacgtgtaaagtcccaattcagtccagttttctttgttctatatgtgtcatgtgtgtcttattcattggaggtagagcaaattgacaggcttttaaacctcccaaaaacaagaaattaggttgatagacaatcatgagaaagatttttacaatgagttcgtgctcataagaagtgtagagccaaaatgatgcgaaggaggaaaagatcagatatgaaacggtcaatctctatttttattacgtgtttattgattacgttattgacaatgggcggcatgatagcttcgccggcatcagcagcagggacaaaaacgccagtagccaagaatggccagcttagcataaaaggtacacagctcgttaaccgagacggtaaagcggtacagctgaaggggatcagttcacacggattgcaatggtatggagaatatgtcaataaagacagcttaaaatggctgagagatgattggggtatcaccgttttccgtgcagcgatgtatacggcagatggcggttatattgacaacccgtccgtgaaaaataaagtaaaagaagcggttgaagcggcaaaagagcttgggatatatgtcatcattgactggcatatcttaaatgacggtaatccaaaccaaaataaagagaaggcaaaagaattcttcaaggaaatgtcaagcctttacggaaacacgccaaacgtcatttatgaaattgcaaacgaaccaaacggtgatgtgaactggaagcgtgatattaaaccatatgcggaagaagtgatttcagttatccgcaaaaatgatccagacaacatcatcattgtcggaaccggtacatggagccaggatgtgaatgatgctgccgatgaccagctaaaagatgcaaacgttatgtacgcacttcatttttatgccggcacacacggccaatttttacgggataaagcaaactatgcactcagcaaaggagcacctatttttgtgacagagtggggaacaagcgacgcgtctggcaatggcggtgtattccttgatcaatcgagggaatggctgaaatatctcgacagcaagaccatcagctgggtgaactggaatctttctgataagcaggaatcatcctcagctttaaagccgggggcatctaaaacaggcggctggcggttgtcagatttatctgcttcaggaacattcgttagagaaaacattctcggcaccaaagattcgacgaaggacattcctgaaacgccatcaaaagataaacccacacaggaaaatggtatttctgtacagtacagagcaggggatgggagtatgaacagcaaccaaatccgtccgcagcttcaaataaaaaataacggcaataccacggttgatttaaaagatgtcactgcccgttactggtataaagcgaaaaacaaaggccaaaactttgactgtgactacgcgcagattggatgcggcaatgtgacacacaagtttgtgacgttgcataaaccaaagcaaggtgcagatacctatctggaacttggatttaaaaacggaacgttggcaccgggagcaagcacagggaatattcagctccgtcttcacaatgatgactggagcaattatgcacaaagcggcgattattcctttttcaaatcaaatacgtttaaaacaacgaaaaaaatcacattatatgatcaaagaaaactgatttggggaacagaaccaaattagttaagcttttttttggcggacatcagtaacgatgtccgtttttatcatctaataggaggtttgcgttgtggatgaaatactgaaacagtatatggtgctgtataaaaaaatgagtaatatgataaatggtcccgactatccaggtaaggaaaaagacatccagcatcaaaaagatcagatcgaagtttacgaaaaacagctgcagcaaggattttctacagattatgactatgatgtgtttgctgattctgttatcaaatgcgcatatggcgatatgacgctggaagatttagaagccgtttattatggattgacaacaccatttttttgatttgtcattcagcagtaaaatttcaatttctgtctcactaacttaagtatactttgatattgagacagaaatttatttattttgtttacttcctagaatatatattatgtaaactagaaaagatgaagattaaagctttgctgtttttatgtacatcctttcttcttcctgtaattcagcaacaaaataaaaaagcgatttcccaatcggaaaatcgccaattcagacactctattatttatgagtgtctttgtgctcttaacgatttacaacaaatgttgttacgctttgagctggaagatgggcccaaaaatgattgcctgatacagtgagattcgttccaggttgtagattgctgctgctgctcgtgatccatctagatacgtttgaagcagatccattctgcaaaacaaagttttggttgacccctgtgttgcttttattgatagcaacaataacgaccttgttgtcacctttataggctgacacgtaaacgttcgcattagggtttttcgttgcatcaatccttacatagccgggacgcacaaactttgagaaatgagccatattgtagccgcgtttgctgatcgtaccatcttctttcataggtccatatgatcttcgaatgtaccaccatacataagcttgaaagtccccctctaccatcgcattgtgaatatgctgtgaaacatccaatgcctcaggccatcgatccgccgagttgttatcactgtttggatagtatacttccgtcatccaaaggtccttccccgctcctttttgtttgaaaagaggataagggaattggctgacctgggtgccgtacaggtgagttccgagaatatccatattggcaagagcctgcggatcgttcaagatcgggtccgacaaattcttcaagtattgaaatgactcaggcgcaatgacgcgggcattgatcgagccggcgttttctctcataaagcgaagtatttcttgcggcgtccaccacgtccactcgtgagcgtaatcaggctcgttttggaccgaaatcgcgtaaagattcacaccattattcttcatgaaggtaacaaaatcgttaagatgctgcgcgtatgctgcgtacttgttgtatttcagccgcttagctgatgtgtcaccattccgattgaaggtctcaaccatatcacttggaggattccagggagatgcaaaaacgattgccccatgtttgaccgcactcttggcagtctccacctctttataccaattatttcgattttcatctacatgaattcttaagattgaaaatcctaactggttctgtccattgccaaaagcagtttctctttgagctgctgtaagatccccagcccaagcgggatgattcatccctccaaaaccgcgaatcacttgtttctctgcagatacattaactgttacatcactggctgccaaaacttcagtagcgcctggccctaacatgactgacagcatagtgaaacatactaatagtacacaaattgttttttttatgcgtggaatcatttattcctctccttcgtcatgtgtcttttacggtattaaaaaatctgcatggcatatccataatggcgggctgttccggtgatggcccgtacttcacccgcctcgtttttaagcggtcccattacgagtcctatctttgcgtaaactgccagtaatcaaaattaaacaagtttcctgtacctgttccggtaaatacaaagaatactttgtgcacaccggttgccccgcttacttcagtttctatttctctccacgtttgcgctccacctgtggaaggtacattcagagttccaacaagcttaccatcagcactgtcgaggcgcacttctatttttccgcctaaagtggatgctacatttgctttaaatgtcctggcaccgcccgctccgaagtctgcatttcctacagcaatccagtctccattttgaatgcttgttacatgctgattatttactggcccgccgggtgctgtggacttctctgtcaaaatgcgtccattccaagcaaacgtttcagcttctacccggttataaggattcaaattggaaagctgtgttacacctgcataatttgctgctacctcttggatggatccatctgggttatgcaccagcttattaatatggggagaacggtatcctttgccggccccgaacagagcggaactgacagtttgcgcatggtacaccacataccactcgtttttaaaattgaaaacagcatgatggttgtttccgccgcctccgaaaaatgcacccggatttttcaggaagtgccctctatatgtaaaggggcccatgggacttgaactggtcatgtagccgatctcacccgggggtttatcggccggatgtgtgccgccgaaattgatgcaataggagtaataatatgttccgttatacttgtgcaatccggaatcttcaaacatgaaaggcgcatcaattgtagatgcacttccctcaacactcgtcatatcaggccctaattttatgacccttgccgttttaggattggcccattgtccctgcgttggatttgaaccgccaggaacgcctccgccggcatacaggtaaccggttccgtcgtcatctacaaatactgccggatcaaaaagccatacaacacctgacattcctggcgtacttggcgttacgagcggttttccgattgggtcggtccatggaccaatcgggctgtctgcggtgagaaccccgatacctccgccgctgtttgcgaaataaaggaagaatttatccttgccattaatttttttaactgcgattgacggtgcccaggatgcacctgcccattttgcaattccacggcctccattagctccattggcacctgctaccggaatggctccgtggtctgtccagttcaccatatccgctgaagatatgacgaatactctattcaaattggcaaatgaattatctttaatcgttccgttgctattatattcatagtcatcacttgacatataaatgtagactcttccgttataggtcagcgcaatcggatctgctcctaaatgatggtcgataagcgggtttgaattccctatatgttttgcaattgtagtacttgtggcagcatacgcagacttcccagataagcagctcaataataaaactagaatccataaacatacgctacactttttcctcatcacttcacatcctcctttttctttaaaatgggggattttcttttggaatttgatgacaacaggtcacgaagattgcacgcataaagtagccggaagctgtttagcaatgttcccagttgttctgaaagctcatcttcatgtgtctccattctctcttttcttcgaggagatcgcaccactccttcaaaattgttcaaaaaaactttcccattcctagcgaccattgtccagaaaataaaaagacaggattgttcatggcctcccactaatcacattgaacggagattacatcattatccaagatatccctttatctaacatcctacatcattaaaaaaattgtgtatagaaacttttggaggagttagtgttcgattctacaaaggaactggatacatttattcattgataagatggggctaacactccttttatatttttatgtaaagatagttttcagacacaaaaaaacagccgtcaatgcggctgttttttcaagagtataagaactattgagcggtatacccgctttttcatgttttgttcatattttattaattgtttattcaacactgtccgctatagtaatccatatcaacaaatatgactgccactcgcatcttttatgaagggaggttcgttacgctgaaagaaaaaataaagacattaggccgtttttgcaccgtaggcgtcggcaatacgctgatagattttggtgtcttctttcttcttaccgcttgtcatgtctcttatctgccggcgcagatctgctcctatactgcaggtatcgtcaacagctatgtgtggaaccggaattggacgttttgtgtgaaaggtaaggctgacgggaaagagatcgtgcgttttctcatgattaatattgccgcgtcggggatcacctttttgctgctttatttgtttcaaaattgcggctgctcgcttttggtgagtaagctcgccgccactatcggcggaatgatgatgaattttatcggaaaccgaatctgggtatttggagattcgctgaaaaacatacaggatcaggagtgaagatgaatgagaaaaaaagtgagaaaagcggttatacccgcagcgggtttaggaacgagatttctgccggcgacaaaggcgcagcctaaagaaatgctcccaatcgtcgacaaaccagcaatccaatatattgtagaagaggccgcagagtcaggaattgaagatatactgattattacagggagaaacaaacgctcgattgaagatcattttgatcggtcggcggaattggaattcaatctccgggaaaaaggcaagacggagacacttaaggaaatgcagcagattgccgatttggccaacattcattacatccgccagaaagaaccgctcggattaggccatgcggtgctgtgtgcggagcattttatcggagatgagccttttgccgttctcttaggtgatgatattatggtgtctgaaacaccggctcttcggcaattaatggatgtatatgacgtttatggcacagaggttgtcggtgtacagtcagttctccctgaggatgtcagcaaatatggtattataaatacatcagggtctcaagggcatgtatacgaagtgaacgatttagtggaaaagccttctcctgaagaagcaccttcggaaatcgcagtaatgggacgttatgtgctgaattcttcgatcttctccgttttgaagacaattggcagaggcgcgggcaacgaaattcagctgacagatgcgcttcgtgaggtttgccgtaaggagccgatccatgcccggctgctggaaggaaatcgatatgacattggcgataagctgggctgttttaaagcgagcaccgaaatcggcttaatgcgtcccgaaatgagatctcagcttttggcctatttagaagatgtgatcaaacgggaaacgaaagaaatgctgcggtaaaaaaattgtaaccatcttgctcgtcaatcagtcatataatagtgaaaaagattaggacaggttgtgaagaatgtgggcagtttgataagcgaaattttaacatggctgacgaacatgggatatgcgggtattgcgattgggttaatgattgaaatcattccgagtgagattgtattagcttatggcggctatatggtatcggagggcacgattggatttattggcgcaattattgcgggtgttatcgggggcaccattgcccagatctttatttactggatcggtcgctatggcggcaggccatttctggacaaatacgggaagtatttattgattaaaaagcatcatatcgatatgtcggaaaactggtttcagaaatacggcgccggagttgtcttctcggctcgttttataccggttgtcagacatgccatatccattccggcaggtattgccagaatgccttttctcaaatttgtggtactgactgtgcttgctatcattccatggtctatcctgtttgtttatttaggcatacagctaggaagccagtgggatgatgttgagaatatagcaggcacttatacaacaccgattatgatattggctgttgtcgtgatagccctttattttgtgattaagaaacgtacagccatatttaaacgatagctagcggatatgcataggggtgactgacgctcccctatgcatatttttttacttgcgatgttgatttgccagcttcagattctccgctaaaaatgcgacaaacacttcatcccgcacgagcgatgcggcataatttctcttaataaaccattctgcctcttcaaacgctgcgaatgtttcgtcttgggtttctccgttaatttgaatattccattcgttgtctaaagggaaaagaaaaaatctcatttgtgcgcgattttcatataatgatccattcgcagatccctttagattatagatgttacggaaggcatccggccgtacaggatcaatacggaaagcttcagctacaaacaactcgtatacttcatcggttattgaacagccggacgcttttgcatgccctccgccgccatatcggccggcgatttctgacacatcgatgtaatcatgaatggtgcggagactgactcgttttgaccccatgctcaaaatcgcaatgtaatcgaggtgcgggttatctttccctagcctgttccccagctctgaatggtacgattcagcgtgaacgatgcctacacagtgttcgtgaacaaaggtttgtaccatttcccttttctttctgcggaggtagcgctcgattttttcgtcttctaaatcaagcagtttttcttcaaaatcatcgaagaaaaattcgtcatgcgtggaaaggcgctggatcatttttgcttcaaattcatcgattgacagcaaaaagaaaagatcattaagccgcttcgcctgtttttgatcgtaccgctcccactcccatgtatcgtattggcggacgagctctgtgaattgatctaaggcgtttgtcggtttcatgaagccattttcaacgagatagccatataaaagcgatgtcgcggatgtgagccttccatcatcgtattccacctggacaaatccccattcatgctcattcaaatgaagggctgttttatgatggtctatgagcttcactttgccccctgcatgaacatactcattcaatctctcttcgttttcttcattgacggcgagatcggtgatgaataacgcgtcctgtctgttgctctccttcgctttttctaaaaagtactgcacctgtgcgtttaagccgttgacagagttataccggacctctacgtcttttccgaacgccaattttgctacgattccgcatcctactccgtccaagtcgttatgtgaatataaatgatacacaatgtaggcccctttttatgataaactgacaattgccgctagaggtgcggcagcctttatttactattctaaaaaaccaagcgttttatgcaatggtaattagttgacataatgttgttattgtaaatatacaaaggagcgctttttttgcgctcctaagttcttgcttttacaccggataaaccggatgctttcgattggtaaatgtcatttcctttgtcatgtatgccttgagccgtttggccagctcatcacgcagcgaattggctgggataacagcatcaatgatcatttctgaagccagacggtagatattgatgtcctctttgtattcctcccgtttgctgctgataaatgcggctctctcttcttctggcagctcggcgatttttttagcgtagacagcgtttacagcggcctcagggcccatgacggcgatttgggcggttgggagcgctagacagcaatccggttcaaatgccggccctgccattgcatacaaccccgccccgtacgcttttcggacaatgacagagagctttggaacagttgcctccgacatcgcagaaatcattttcgccccgtgtctgataatcccagcctgttctacttttgtgccaatcataaaaccggggatatcggctaagaacagcaatgggatatgaaaagcgtcacataaggtaataaacttagccgctttgtctgctgaatcgtggaataagacgcctccttttaccttcggctggtttgcaacaatgccgacaggctgtccgtggattcgtgcgaggcccgtcaataattccggtgcaaataaggctttgatctcaaaaaatgagtcttcatctatgacccgctcaatcagctcatgcatatcaaaaggtccgttttgattttgcggaatgacgtcggcaagcggagttttgaagtgttttggcgggcgtttctcatgaatgggcgctttttcttgaaaatttgccggaaagtaagacaaataagcccgcgccagctgtatggcttcttcttcagtttctgcaagaatatctccgcagccggagattgagcaatgcatacgggcgccacccatttcttcaagagacactttttctccaataaccatttccgccatccttggcgagcctaaatacatggaggcgttaccgtctaccataacgacgatatcacagaaggccggaatataagcgccacctgccgcagatggtccgaaaagcagacagatttgcggaatgcgtcccgataatttgacttgattgtaaaaaattcttcctgcaccgcgtctccctggaaagacattgatttggtcggtaattcgggcgcctgccgaatcgactaaataaatgagcggacagtttaatttttcggcggtttcttgaattctgatgattttttcaactgtttttgctccccatgaccccgctttcactgttgaatcattcgccatgacgcaaacggtttggccgccgattttgccgatagcggttacaactccgtcagcgggaagcccgtctgacatacattccgcaaaaaaagcgtcttctagctcaatgtcatcgtcaaagagaagggaaagccgctctctgacaaagagcttgcctttttcccgattgctttgatgatacttttccgctccgccttttcgaatccgttcagcccgttctgttcgttccttttcataatccatcagcattgcctcccttttatattcccttgtatacggcccgtcttttttcttgaaaggcctgaagcccttctctcctgtcttttgtcgggatggtttgttcatacgctttttgttcaatcgcaaggcctgtagcgagatctgtctccaatcctttattgattgcaaatttagcctgacggacagcgatcggtccgttggcagaaatggctgcggccagttcctctgcttttggcataaggtcacaaggagccgtgacatgctctacaaggccgatttcttttgcttcgtgtgcggtcacgcgtctgcctgtataaatgaattcttttgcttttcctctgccaatcagccggggcagcctttgggtccctccagcgcccgggataatagctaaccctgtttccggaagtcccagcacagctgattcagttgcgattcgaaggtcgcatgccaatgccaattctagtccgccgcctaatgcgcttccatttatcgcagctatgaccggctgcggcaaggcatcaagtaaagccgccgttctttgaatgagagatacactttccagaacctgatcttctttcagttttatccgttcctttaggtctgcccctgcacaaaacgctttttcaccggtgcctgtgaggatgacgcaacggatgtttgagttaaattcaatttcctggataatcatttgcaggtttctaagcatttccgctgaaagagcatttgctgcctgaggcctgtttaaggtgatcaacgcaatatgttcatttttaacagtaaaaagaatagaatctcccattgtatgcgtcctcccttttatcaagatgatttaaacacctgtaaatttctgctcggcagcggtttgcccattttttcttcaatccatttggccgcagatagcagtttttcgagctttacatttgttttgatatccatctgttcaagcatgtacacgatatcctcagttgcggcgtttcctgatgaacctggcgcatatgggcatcccccaagcccgcctgccgagccgtcgaacaccgtgatgcccatttggagtgctgtgaccatgttggccagagcggttcctctcgtatcatgaaaatgcagggcaatttgattagccgggaatcgtgccaaaagagcttcaagtacagtttccacttgggcgggattagctgctccaatcgtatctccaagcgacagttcagaaatcccaaattcaaatagagcttctgaaaggcgaatgacttgttcaatggggacatctttttcgtacggacagccgaaaacagtcgagaggtaggctcttgttgtgaggtttgctttttgtgcgtcgttgtttacttgtttgagtatatgaagggattcagaagtggatttattgatgttttttctgttgtgcgtctcgctggcggacataaaaacgcaagcctcgttaatgcctccttcaagtgcattctccagtcctctttgattcgggacaagtgccgcgtacgttacccctttttctcggtcgatgccttttgctacatcgatagcatctcgaagcgccggaatccatttcgggtgaacgaaggatgtgatttcaatatacgacagccctgtccgggaaagctggttgatccaggttattttatcctctgttgcgatccaaacgggctcgttttgtaagccatcacgcgggccgacttctttgattgtcacttttttaggatatggcatggtcttcctccaaattattgagtggaattgctcagttcgagcagtacgtctccttcatttacaaagtcgccttccttttttttgacttcttttacgattccgcttctatctgcaacgatcgggatttccattttcatcgattccaaaatggctacctcctggcccttttcgatttggtcgccggctttgacgtggactttccacaggtttcctgccatttgtatgctaaccgtcatgacaactgcctcctttataggtgttgtttcaaaaagtcagtcgtgacatccccttctttaaatgcctttgttgccgcagcctgtatgagaagcggaagatttgttttgattccttctacatggtagtcgcgaagcgctgtctccagtttttcaattgcttctgttctggactggcctttgacgatcatcttagcgatcatcgggtcataaaaaggggtaacaatgctgtcttttgctaccgcacattcgtgtctgactcctttatggtcagggagtgagaacgcagtgatcgtgcctggtgacgggtagaaggtcttggggtcttccgcgtatattctcacctctatcgcatgcccgtttcgtttgatgtctttttgagagaatgtgagtgtatggcccgcagcaattcgcagctgctgctcaactaagtccaggcctgttatttcttcagtcacggggtgttcaacttgcagtctcgtattcatttcgaggaaataaaaattttgcgtttggtcaactataaattcgatggtgcctgcgttcgtatagccgattgccttcgctgcttttaccgctgtttgcccgatcttcattcttagttcatcgtctacaaatggagacggtgcttcttcaatgactttttggtggcgcctctgaacagagcaatcacgttcaaacagatgtactgtatggccgtgttgatcggccaaaagctgaacctcgatgtgacgcgcatgttcaataactttttctatatacatcgacccgtcaccgaaaaaatctgctgcgcgctttttgtttccctcgtacgctttttttaatgcttcttcattttcaacacgctgcattccgatgccccctccgcccgctgaagctttcagcatgacaggatagccgatttgacctgcggtgcggcaggctgcctctatatctccgagggattcagaaacgcccggcaccacagggacaccagcagcctccattgcttttcgcgcttcaattttgctgcccatctttgcgatgatatcaggggaaggtccgataaacacgatgttttcttgcttgcagcgttcagcgaaccggctgttttctgataacaatccatatccagggtggatcgcgtcggcatttgcttttttcgccgtctttatgattctctctatatttaaataactttcactgactctcgattctccgatcaaataagcctctgtagcggcttttgtatggggcgcgtccttgtctgcttctgaataaaccgcgaccgttttaatgccgagacggctgcatgttcggataattctcattgcaatttctccgcggttggcgatcagtacttttgtaaacatgatttcacctcattgacttgatgataggttgaacatttcaatcgttttttctcgcagtttatatttttgaattttgcctgaggccgtcatcggatagtcatccgtaaaaataacataacgcggaattttgtggcgggcgattttccctttgcaataggctttaagctcatcaggtgaaacgcttttcccgtctttcagtttaatccaggctgcagcttcttccccgaatttggcgtcaggcacaccaacgacctgtacatctaaaacagcgggatgccggtataaaaattcttcaatttcccgcggataaatgttctcgccgcctctgatgagcatatcttttaatcttccagtgatgcggcagtacccgtcttcatccatgacagcaagatctcctgtaaacagccatccgtcatgattgattgcttttctggtcgcttctttgtctttataatagcctttcatgacgtgatagccacgggtgcacagttctccctgcatgcctctttgaacttcttgacatgtcccgggttctacaattttcacctcagtatgtggcagggcacggccggttgtttcgactcttcttatgaaggaatcatttgctctcgtttgtgtaatgactggcgaggcttcggtttgtccataggcgatcgtaatgtctttcatgcccatcctttcaatcacagctttcatcacttcacttggacagggagagccggccatgattcctgttcggagcgtcgatagatcatatgcatcaaaatccggatgatgcagctcggcgataaacatggtaggcacaccatggagcgctgtgcatttctctttttctaccgttttaaggacggtaacgggatcaaattcttgcacgggtatcatggctgccccgacggatacacatgccaaaaccccaaggacgcatccaaagcagtgaaaaaacggaacagggatgcacatgcggtcttgagaggttaaagccatacattcagcgatattagcagcgttattgatgacattgaaatgggtcagcatcacgccttttggaaaccctgtcgttcctgatgtgtattgcatattaatcacattgtctttatccaggctgttcattctctcttcaagctcagcatctgtcactgttttcgccaatatctctgtatcgtcccaatgatacatgccagacaatcgtttattgccaatatagatcagcgtttttaaaaagggatagcgttcagatttcagttggccgggctttgcttcttgcagttctggaattaaactgttcacgatgtctggataagaagtgcccctgtatgaatccatgataataagcgccgcggcatccgattgctttaacaagtaatcaagctcgtgtgcttgataattggtattgacggtcacgagcacggctccgatcttcgcagttgcgaactggacggcaagccattcagagatattagaagcccatatggcgacgtggtctccttttccaatccccatccgcatgagacctttagcggtttgacggcacagactgtcaaattgagcgtacgtatagcggatatttcggtctggatacacaacagcatctcgatcgggatacgcatcagctgtttgttccagcagcctgccgattgtggaatggatgagttcagccattcattgttcctcctttcttaatgataggaaagcgtttacatttttattttaaaagctgtctggcgatcacgagacgctgaatttcagatgtgccttcaccgatttccattaattttgcgtcccgcagcatccgttccaccccatactctttcatatagcctgaacctccatggatttgaatggcttgattgcaagctcttgtcgccatttcagatgcgaatagcttggcgtacgccgcttctttggtgaacgggcggttatgatctttcagccaggcggcttttaacaccatttgccgtgccagatcaatttccatcgccatgtcagcaagcttaaattgaatcgcttgaaatgaagaaatcggctgtccaaactgctttcgttctttcgcatatgccaatgatgcgtcaagggccgcttgagcaatgccgactgcaagagcagcgatggagatgcgaccaccgtccagcgtatatagaaactgtttaaacccttttgttggatcgccgagtaagttggccgcaggcactcttacatcctcaagcaaaatttccgctgtattcgaaccgcggacgcccattttatcgtacgggctcgtaatcgtaagtcctggtgtgtcagttggcacgattaatgcggagatgatgttttttccatctttgtttttgcctgttactgcagtcacaataactgtgcgtgcgtagcttgcattagtgatccagcacttttcgccgttgattacatactcgtcaccatttgaaatcgcttttgtttgagtgcctcctgcatctgagcctgcatttggctccgtcaggccgaatgatccgagtgctgtgcctgaagccagcggcgtcaaatgcgtccgtttttgctcttctgttccgaagtagtatagagggcttgcgcctagcgagaccgctgcagcatagcttaatccagtactgccgcaggctttgccgacttcttcaaccgctaaggcatatgaaatcgtatcaccgccagatccgccgtattcttctggaaatggaatacccatcagaccgagttcacccatttttttaaatgtttgcatcgggaactcgcctgtttgatctacatgttcagcgtgaggagcaatttcttttttcgcaaaatcttttaccatttcacgcaccatttgttgttcttttgtcagctcaaaattcacatcgtttcctccttcacatctttgtaacatcctattaggcgagttctataatcattccctgacaagaaaagtctgaaaattaaaactgaatcattttttatgtgataatatcagcgggatgagcaaatacatgcagtaggcgcataccatccatatcgtaaacgcaataacttggccctttgataaagccgggaagatgaggggaagattccaaagggaaatcgtatccatcaataaaccgaccgctgatccccatatacctagcttgatcaccgcgaactgtgattgatcgagtttttgatagagaaagaacacaaggcataaaacaagagcagtgcccgctcccaagagaagaaagttcggcaaaaaggcttcttcagccggatcagtcaacacagcatctccgaacagcacaaaaaataatgtggcacctaaccagactagaaatgaaaacgtaaaacacgtcctgtacgtgtttctcttcgattttacttagtactagtttctcagattccaataatggaaaatgtccaaacaccgcctccatattcatgtgaatctcacctttgttttttaaaaaaatacagcggtttaccatcgtttcctgtctccaaaatcactaaaaaagacgacttagaaagccgtccttctcatttcttattttgttgttcgtttggaagctttgctttcgttatgaagccggtctgctgaagtgacataatacgtatatttcttgttgggatctgccgtgttatctaagaaggtttgctgctcatgtgtttttctttgcgttgccagcaatgttctctgctttttcccttcggctctgtatatcgcataataggctgtttctttcgttttttgatttgatgggtgatctttaatctgcagaagattgccgtttttgtcttcggtgactttcgtaagcttcggtttttttggggcggtattgtcaagccaaggcatttgcggaaccagtgccggcttgctgtaaaggtcggcgataagcctgtctttgatgccaagcggatttttgttgagatccttgaggctgaaatgcatgcttcctttcaccagttcaagctggcggttcaaagtgatttgccgcacatattcctcagggtcggaccaaggcggatcaaaattgttattgattttatatgctgcctggccaatatataagtgaacaggcctatttttgacttcattgctccaccaatcagccagcacgtcgtacgccgctgcgttaaagccgatactccaataaatttgcggagcaatataatcgatgtcgccttcttggatccaatgtcttgtgtctgcatatagatcgtcataatttctgacgcctgcttttgtattcgatccggtcgggtcatctgctgcgtttctccatactccaaagggactgatgccgaatttgacatacggttttgcagctttaattgtttggttgatttgtttgacaagctggttcacattgtcccgccgccagtcatcgatattagaaaaagcgtcttttccgtattgttcgtactgtgcttgatcaggaaattcctgtcctgctattttataagggtaaaaataatcatccatatgaacagcatcgatatcataatgttttacgacttcttcaatgcctttgacgataaaatctctcgcttctggaatgcctggatgataatacagctggtttccataggcggcaacccaatctggatgttttcttgccgggtgatcctcagacaatttattaagatctgtatgattcattgtaatacggtaaggattaaaccacgcgtgaaattccaaatttcgtttatgggtttcttcaatcataaatgcaagaggatcatagccggggtccttcccttggacaccggttaagtattccgaccaaggcccgtaagctgacggataaaaggcatcagccgtcggtttaatctgaacgataacggcattcattcccattttttgcacatcgtccagcagtttgatatactcctgtttttgctctttcacagataacccttttttggacggccaatcaatatttaatacggaagcaatccatacggctctcagctctctgtcagactgcgcattggccataaacggaacggaaatgacaaacgttccgatgatcaagctgacaaggaaacggataatcgacttttggcaaaccttcattctgtttcttctcccccattacatcactttcactcgctattacggtattcccgggctataaaagggtgattaacagaatgtctatctcactaaataaacgaaaaaagtcctaaagcatgttgtgggccgcttttaggactttttatcattcatcatggtttgcaaactttttaacacgtcaataagttttacgccgacaccgacagccgtttcaaggatcgcttgtgctccggcaatggctaaaataaagatcagcggtattgcaatacgaggcaaaaaaagatagccaagtccgatcaagatggcacaccaaacaccggcacaccagtagcaattgagcatgtatccaaagttagaagccggcacacttttttcatctacatgcccgttttgatcaacaatccttttctttttcataaaaggtttccggataaattctgtgattttgtcgaatacaatcaaatgtgtcagcctgtaactggctagaatcagcatgataaacgtaagaaaagatagatgatccatgacaagcctccaagaaaaaggatgatgttatcattccctagtgtcatcgatccattctttgatacaaaaagaagcggacagagaatgcctctgtccgcgaatccgctctattgtttgtgcgggattgctttatttgaagtgatcttttctaaaatgtcgaggatgatgtcagcattcttttcagcatatgttccttccagcatgtctttatgagcgccaaaacccgtgtactcactatagtttccacaggcgccttcccatttcgttaagcctgtattctcgctggtttctgggtggattccagcttcgatgaaatgaatacttgctttgatgtgcccttcattcagcaattgtgcccaatattcctgatagtttctttttttcttcatcaccttttctctgactgcttcaggcagatatgctgcagattcgtcattaccggtatcgataggcaaaggctgttcttttagataagcgtccacgataatgaagtcgctgacttctaatcctttgcgctccatagcctgtgccacttcaaaagccaggtttccgcctgcagagtagcctaataaaacgtatgggcccttaggctgtatgtccgtcatgcaattaacatattgttcaatgcgggtgtcttgttcaataaagtgaaacccgtatacggctgccttctcattcagcaataaagcaaggtctttaaaataaatgccaaatcccgatatcggcgggaagcagaaaagattttgcgcgccgtgctggttcagtttgatcacatgctgttcatttgctgctgtcagctgtttagaataaagtttttcggcaagctgagcgattgtcggatgttcgaacaagaaatcaatcggtatgtcaatgttctgctgatgttttagtgtatgtatgacttgcagtgcttttagtgaatgtccgccaatagcaaagaagtcatcatcaatactgattgtgttaacaccgaggacttgcttccaaatgttcgccaattcttcttcaaccaagtttcttggcaatatgatgttctgtcgtttggcaggcttattttctggaataggcagcgcgctgcggtctatttttccgtttccggtaagcggcatccgctccacacgcacccagtgctgcgggatcatatagtctggaagcacacgcgccaaatcggcgcgaaaatccgtatctgtttttttgtgatcaccgacgtaatgagtgtacagctgcgcctctccatctttttctctcaatgtcactgctgcttcttgaacgccttccatttctaacaggcgcgcttctatttcggcaggctcaattcgttttccgcggattttcatttgcctgtcaattctgctgatgtattctaagtttccatcaggcagccagcgcgccaaatcaccggtacggtatattctttctccaggcaagaaaggatgaggagaaaacacagcatttgtcaggtcatctttgttcaaatagcctttagcgaccccatcaccgccaacacaaagctcgccgggaacgcctattggcaaaagacgtccttttgtatctaagatgtaagcggtgctattgctgattggttttccaatcggaatcggccccgcatagtctctctttatttcaaaaaaggttgaaaaagtcgtgttttccgtaggcccgtaaatattatgaagcgcgagatctggacaggcgtgtctgacagcattcatcagagcaggagagagtgcttctcctccgacatataacgtatggaggccgcgaaacatgtcagctcgtacctgtgccagctgattaaaaagagctgtcgttaaaaatagcactgtgatgtcattttcaagcaaatacgctccaaaccgatcaggtgtcagcattgtcgatttatcaatgatatgaaggcttgcgccatttaaaagtgccccgaacatttcaaaggtgacggcgtcaaagctgatagatccagtcagaataaaccggtcatcaccggacgcagacgtgtaattgctgtttctgacaagggacacgacattgcgattcgtgatcatgacccctttcggccggcctgttgatcctgaggtatacatgatatatgcaagatcgtctggactggagatggtgttgataggaaaatggttctctcccatcaatgcctgcgcatctgcaatcatacatgttcctgagaacgcagcattttgctccagccccttttgaacaatcagcatttttgcttgcgtttcctcaagcataaagctgactcgttcaggcggaagctcctcatcaagcgggaggtatgctccccctgcttttaatacggcaagcacactgatcatgaattcgggagaatgtgcagccaatattccggctgtctcgtttttccgaaatcccttttgaattaactctctggcgagcgcattagagcgtttatcaagctctttatacgaaatagacatattgccatacacaagtgcggtatggtctggcgtcttttctgcttgttcgcgaaataaatcgataattgtatgtttctttggatactccgtttttgtattgttgaactgtgtgacaatctgctctttttctgttgcatcaagaaaagaaaaatcagcaattggcatatgagggtgctgtgcagctgtgctaagcgcttgcgtaaattgcctcttgatacaactgatccaggcagcatcgtaaacgaatgcattatagctgaacttgatgacaagctcttcgccgggagcaacgacaagattaaagttatatcctgattgctcggatacttgaacttgatcgatttgcagcggtgaatcggtctgatcagcggaatcggcgattttctgctgtaacggatagttttcaaagacgataatgtgatcaatcagttcctgttttaatgcggtgtttgcctgaatatcaaataaaggctggcaggtaaacggctcagcttccagcatttctttctggcatcgtatgaacagttcttgaaacgtttcgtcttgatgtgttttaattcgaatcggtatggtattgataaacaaccctatcatttgctccacgcccgggatttctgacggtcttcctgatacaactgcgccaaacacaacgtcgtctgtgcggttatattgctgcagcatcacaccccagacagcctgaataagggtagcgagcgtgacgccgtgttgtttggcagtctctttcagcttgtctgtcagtggtttatttaatgaaaatatcaaatcttcacggtgataaccttcttttgtttctttatcagacacacgaggcagaggtgatggagtgctgtagttttttaaataggtatcccagtaggccgctgctttttctttgtctcggtttgtcagccaggaaatataggtgctgtacggccggacagggtctaatgaaagcggttttcctgcatgaatcgattgataaatttgcataaattcctgcataacaatacctaggcaccatccgtccattaaaatgtgatggtgactccaaagacagacatgctcatcttcagctgttttgaacagagaaatccgcatcagcatgtctttttgcagatcaaagcctttttgcttgtccttctctttaaagcgttcaatatactcattctggtcgtttgttggcagatgggaaatgtcttcgctgtacaaatggaattcacgttctgtcatcacgacttgccgaggtcccgacaaatgcgggacgtgcggcaaaaacacggttctgaaaatatcatggcggtcgataatggcttgaatgctgcgctgaaaccatttatagctgaggcttcctttaatggtgaagagcgactgctcgacatacgccccctcctctttacggaggaaggaatgaaagagcattccctcctgcatgtgactcagaggataaatgttcttgattttttttatgttatccatagtgtctgcacctttcttcacggtttcattagtgaaaactgagcatatcagcaatctcttgcagggcatcctcggtcagttcttgatcatcataatcgctgatcgttttttctgtttcgcttttgttctggcagtgttcgatcagctgtaataaaaattgacggcatgtttcgctaagctgttcgatggttttgcgctgaaaacgggtagtgtcataagtcatattgacagtcattttcccttctgcagcgattgcactgatatccagcgactgttcacggttccatgttgtgctgatatcacccccggcacccagcggagagaatgagaaggcgtcctcctcaggtacttcagctgtgcggccgctttcaaattgaccaagataattaaagctgatttctggtgcacctgtgaaattgatgtcttttttgccaggcggagtcaaatatttgatgacaccgtagccgaatcctttgtcaggtacacgtctcagtgtatcttttgttgtttttagcacatgaaccatgtattcttccgaatctggcaagtctgcgttcaatttaaccaataacggataaatggcggtaaaccatccaaccgtccggctcacatctattccttctaatacatcctctcgcccgtggccctctaatgatagtttgaaggcggattgattggtccaatggcgcagcgcaagaatgacagaagcgagcagcatgtcctgcgtatcagtgttatatgcgctgttggcgtcttttaagagtgctgctgtctctttctcgtttaaggtaaacgaaatcgtggaccgttgtccctcgtgtgctctagttccatcaatgtgatcaaaaggcaatgcctctgtttgatactcttcggcttcgcgccaatacttgagctgtttcatgagctgctggctttcagcgtagtcagagagctttttcgtatacgctttaaatgagcttgttttaggcggcagtttgataaccttcccgtctgcagcttggcgataccctaaagccaaatcttcaagcagaacccgccatgaaatgccgtcaacgacgaggtgatgagcagataaaaataagaaatcaccgtcaattgtgtggaaaagaccggcttgcagcagcggaccattcttcaaatccattttctgctgaatatcaagtacatgacgtttgataataggctcatacgctctatttccatcagtgcataaatcaatcatctcaaggccgtacaacgcgtcgtccgaatgactgagcggccgattatattgatcccactttccttgttcattctgtgtaaacaccattcgcagcgcatcatgatgacacgttattgcttttaacgttttgcgcagtgcgtcttcttgtacaaaggtacttcgatgcagcattacggactgattaaaatggtgtttttcttttatatcttgagaaagaaaccatttttgaacaggcgaccattgtacgtctccctcaaccgcagcttggctggaacttgtatctgaatcacggatataagctgccaattcttgaatggtcggatggctaaacaaatctttcactgccatttgcttgcctatccggtgaagccgcgcagatacctgtaacgctttgattgaatctccgccaagttcaaagaacgaatcagctgttccgatcttttctgcccccagtacttcttgccatatatctgccagtatttgttccattttgctggctggcgggaggaatggacgttcaccttcgtggttatatacaggttttggaagtgctccgcgatccagcttgccgtttggtgacaatggaagtgagtccagtttttcaataaacgcagggtgcataaacaccggcagcttgttttgtaattctgagcgtacagcatttgtgctcaactctggttttgtcaccacataagcacttaattcggtttgtcctgacgctgtttcatgagcaactactgcggcgtcttttacaccatttatacaccggatgaccgattcaatttctttcgtttctacacggtatcctctgattttgacttgatcatcgattcttccgagatattcgagtgttccgtcggccatccatctggcggcgtctcctgttcggtacattcgtgtttcgggtttaaatggattctgcgtgaatgctctctctgtcagttctggaagattaacgtaccctcttgcaagccctgttcctgctatacaaagctctcccgcaacaccgattggctgaagctgatgattgctatttaaaatcagcacttgagtcccgtcaatcggctggccgatgcttacgtatgcctgcttttccatatgtctcatgacggtagtcgccacgctgttttctgtcggtccatattcgttggcgagttcggtatgcggacatatagctaagctgcggtcgatcaattcgcggtcagccgcttctcccgccagtgtgacgactctaagtgtctttacatcttccggctgcactatgtccaaaagcgctcgatataaaacaggcacaataatcatatgtgtaatccgttgacgagacagctgatgcttaatgaccagaatatccttcgcttcctcttcatgaagcaaaacggcttttgcacctgacaaaagcggtgtaaacatactcgttataaagccgtcaaatgagaaagaaaagagctgcagaatggtatctgtctcgttgaatgcataagcgtttcgccgccactgaagagtgttggcaatacctttatgctcgaccattaccccttttggacggcccgtcgttccagaggtataaatgatataagccaaatgatgagcagacgatacttgcggcagcggtgatttgtcgtatgcctctacactttctatcgctaagaactctccttcaaagtcagcaagtgcttcccgatccgcttcatttattgtcatcagcagtttcgttccgctgtcgctaaggatatagcgtttccgttctgtcgggtattcaggatcgatgggaacgtaacagcctccggctttccacacaccaagtatggatgctatcatactgaacgaacgatgcatcatgatgcctactggtgtgtccggcttaacacctcggctgcgcaatgcacgtgcgattccattggaccactcgtcaagctcctgataagtgagtgttttgtctccgctgacaagtgcagaagcttttggtgttcgtgcagcttgctgctcaaacaattgactgattgtttgaactccgtattgattcgcttgcccggtgttaaactcattaagcagctggtgccgctcttcttgggtcaggatgtcgatatggttgagtgtcacctccgggtttttgccgatgatgctaagtacatttgttaaatgcgatacccagcgttcaatggtggttttctcgaacaatgcggttgaatattcaaaaaggaaatgaatgtttccgtcgccctcagatgcctgtagtgtcaaatcgaatttagaaacgagatgagaaacttgtgccggcttcattttcaaatcatgaagatacaatggctcgtaatcattattttgaacaactaacatcgcatcaaacactgggttccggctcatatctcgtgtcaatccaagcttatcgacaagctcttcgaacgggtaatcttggtgctcaaaggcttccaatgctgtctcacgcacttcctgcaaatactgtacgaatggcttcccgccctccgggcgtgtccgaagcgccagcgtgttcacaaacatgccgagtatcggctcaagatccttgtgcggccggccggcgattggcgagccgacgatgatatcctcctgtccgcttaagcgtgacaagaacgcggtgtaagccgcaaggagcaccatgtacagtgtgcttccgttttctcgtgccagcttgtgaaggcctgatgcaacctcttgatccagcgtaaatgagaccttgtcaccagcgaagcttcgcaccggcgggcgggcatgatcagcggggagatccagcacaggcagctcgccctcgagctgcttcagccagtacgcctcttgcgttttgtacgcgtctcctgttttgaatccttcttgccatacggcataatctttatattgaatgcgcagcgccggaagcttccgattattgtacagctcgccgaattcttgaatcagaatgttgacggaaacaccgtctgaaatgatgtgatgcatatcaaccagcaacaggtgccgctcatctgatacctttacgatttgggcacggaacagcggcgcttggctgagatcaaacggtttgataaatgcggctgcggcctcctgttcggttcgttcgccgagaactgtagtctgtaacgtaaacggcacctcgtcatggatgcgctgcaccggatcgcctccttcgtcctgttcgaaggcggttcgaagcgactcgtggcgcttgatcagctcttggaaagctctgtccatcctttcagggttgagcttcccttcgagctctaacacagccggcatattgtagcctgtccctccgtcttccagctgctgaaggacataaatccgcttttgggcagaggaaaccggataggtttcctgtttttcagcgggcttaatcgcttcatatggactgtccgttccttcacggataacggtagccagtccttctaccgtcggatgggcaaacacatcttttagcggcacctgtacatcgaattctttggtgatccgtgagacaagcgccgttgcttttaaggaatgtcccccgcggtcaaaaaagttgtcgtgaatcccgacagggccatttttcagcacgtcctcccacagctgagaaagcttcatctcagtcacgtttctcggcgctgtgtaggtctccgcatctgccgctccgccaggagctggcagggcgtttcggtcgagctttccgcttggcgtaaccggccactgtttcatttctatcatataggctgggaccatgtagcccggcaacagtctctcaagctgtgcacgcacttcgtttctttggagcccttctatataagcgcataattccggctccccgctgtctgtccgtacggtaacagccgcctctcttacaccttctatatttcttagtgccgcttcaatttctcccggctcaatccggtagccgcggatttttacctgatcatccgtgcgcccgaggaattcaacattcccgtcagggagccagcgcgccacatccccggttttgtacatgcgttcccccgggtaaaacgggtcttcaagaaaacgctcctccgttaatgccggccgattcaaataacctctggcaacacccgctccggcaatgtatagttcaccgatacatccaacaggcagcatccgctgattctgattcaggatatacaatctgacatgatgaacaggttttccaattggaatccgttcaagtttttcttgcggcggacaatcaaagaatgcagcttctacggttgcttccgttggcccataggaattggttattgaaacatttggaagcaacacgtgaaatcgggagacaagatgggtctccagctgttctcccccagaaaacactcgcttgagtctgtttgtcttaatcggtacagagcgatattttatatgttctaaaaatgcatggagcattgaaggcacaaaatgcatagctgtgatcttttgttcttctatggccttcgcgatcacttcaggttctttttcgcctccctgaggaagcagataaacagaagctccggcataaggccagcaaaacagctcccatattgaagcatcgaatgaatatgatgttttgtgcataatcatatctgaatgctttagctgatagcgggactgtagggaattcaaaaaattcaccgctgatcgatgttcaatttcaacacccttaggcatcccggtagaaccggatgtatagatgacataggctaaagattgcgggagaacatccacattcggattggacaaacgatgtgccagtccgctatttgtctgattgagatagacaatctctcctgcaaatgccggaacatgaagaccggaagactgaagcaggagaatgtttgtaccgctgtccttcagcagaaagctgattcgttcttccggataatccgggtcaatgggcagataagcgccgccagctttaagaatgccataaatgccgatcagcatttcaggcgaacgccggcctataatggcaacagtcgtttcagattttactcctcgtccgatcagctcccaggcgatacggttagcctgttcgttcaattctttataggtcatcactccatcttcgaagataacggccgcctgatcaggcgtttttgctgcctgctgttcgagtgcatagtgtagcgtttgattcattgaatagcccgtctcctcaaacagatggcatgattcaatgaaatctctctcttcttcttttgttaagattggaatatcgtccaattctgtttcaggactggcagctgtatgttccacaagcgtggtgaaaaggctggcccacctttggatggtttctttctcaaacaaagctgtactgtattcaaactgacagaaaagctcggaatcatgctctgtaacgtatagggaaatatcaaattttgatattgggtgctccaagtcgttccactgaagctgtatatcattcatttttagcttttgctgttccatattctgaaggactagcgttgtgtcaaacaaaggattccggctcatttcccgctgcacaccgagtttgtccacaagctcttcaaacgggtaatcctgatgctcatacgcttctaatgccgtctgtctgacttctttcagaaattcctcaaatgtcttattacccgctgggcgtgtgcggagagccagtgtattgacgaacatcccaagaacagcttcaaggtcggcatggggccgtccggcgattggtgaaccaatcacgatatcatcctgaccgcttaaccgagacaaaaaggctgaatacaaagcgagaagcgtcatataaagcgtgcttctgtttttatgggcgagccgctttatgcgggccgtgatctctttgtccaattgaaaggttacttttccgcctatgaattgccgttctgccggacgtcgtttatctgttggaagctccagtataggaagatctccgctaaactgctgctgccagtaagtctcctgcttttggtacgagtctccctttttaaatttctgctgccatacggcgtaatctttatattggatccgcaatggcttaagctgccggtttgcataaagatcggtaaattctcggattaggagctgaacggatacgccatctgaaatgatatggtgcatatccaccagcaatacatgcttctcgtttgacacttctataaggcctgctctaaataatggcgcctggctgagatcaaagggacggacaaatccctcgatagtggtctctttacttaacgtaaacggcacttcggtgtggatacgctgaaccggctcgtcatcagctccaggtacaaaggaagttcgaagcggctcatgccgactgatcagttctttacatacagcagacagtttggcgacatccagtgcaccttccagttctaagaccgcaggcatgttataggcgacaccctcatcaagctgttgaagcacatagattcgtttttgggccgaagatacaggatatgtatcccttttttctgctggttcaattgctgcatacagattttgttctgcctctcgaataattaaagctaatccttcaacagtcggatgagcaaagatgtccttaagtgaaacttgcacatggaattcctttgcgatccgtgacataagcactgttgcttttaacgagtgaccgccattgtcaaaaaagttgtcttggatgcctatatgcccattctttagcacatcttcaaatagttgcgaaagctttgcctctaacagatttcgaggggcagtatatgggtttccgctgattgaagcatctggctccggaagtgctgcgcgatctacttttccgtttggggtaagaggtatgctgtcaacccatatccatttcgccggaatcatgtattctgggagctcactagccatataactgcgtaaatctattgcattcagcttttgtacactgcaatagtaagcgcataattcatgttcaccgttttgatcttgccagatgagaatggcagcctcactaatgtccggatgattcattagcgtgacttcgatttcttgcggctcaattcgataacctctgattttcacttgattgtctgcccgtccgatatattcgatgttgccgtcttcaagccgtctggccaaatcacctgtccggtacatgatcacatcaggcttgaatggatcggatgaaaatttgtcgcttgtcagtttatcgtgattgacatatcctctggcaacacttgcgccggaaatatagagttcgcctggtacgccgcatggctgaagctgtttttgatgattcaaaatatatagatcagtacagcctatcggtttaccgattggcggaagctcaggaatagggtctccaggatgaatggtatacgtagataccacatgagtttctgaaggtccgtaatgattgtgcaggtgtatgccgcgttcacacaacacatcttggaaaaggtctgaaatcattaattgttccccggctgcgatcaggtgtttgacgccatcaggaaacgagttcgcaagttctcgctcgctgaaaatcattttgataaaagcagttgggagaaacacaatattcgtctgatgcttgtttataaatgcaaacagctgaggcacatctctttttatggcttctggcacgatgtggagtgtgccgcctttcagaagcgcagaaaatatttcttgatagcagacgtcgaaggaaggtgtcgcaaattgcagaacatctgcttcaaagtcaatgccggagtgagtatattcgaacttcagcaagttagccatgtttcgatgctcaaattgaacaccctttggtttacctgttgtgcctgatgtataaatcatatacagcagatcgtcagcattgttgactgactttatgttactgccgtctactttgctttcgatatcttctggatgagtgataatgtaattgtcttctaacgatgaggaaagatgcgcttgtgaaacaacatgcgaacagccgcaatcatgcagaatataacggattctgtcagccgggtaatgcggatcaaccggaacaatggcgccgcctgctttcaagataccaagaacacctgtgataaacgccgctgagcgttccatcataatcgcaacgggttcctgtctcacaacgcctttcattcgtaaatgccgtgccaatctgttagccgctttattcagttctctgtatgttaatgagcaggcttgatcaattacagcatgagcatctggtgtcttttccgcttgcttttcaaacatggcatggatggtttcgtaaactggtgttcgatctgtgatttctccaatcagctgccgcttttcagtatctgtcgtgatatcgatttcttcaggtggaagattcggattatttaagatttgtgatacagcattcagaagatgctctttgacagagagcacaaaagaccgatcgtgctgctccgcatcatagttcattttgatatgaatttcttcccctggcgccaccataagataaaagctgtagttggtttcatctgcgacagtgaaattatgaatctgaaaaagatcagaagcatgttcctgtttgttcagcatttgaatctcttgctgcaccggatagttttcaaatacgagaatatgatcaatcagcccttgtttaacagctgagcgggattgaatctcatataaagggtggtagctgtacgcttcagcggcaagacggtctttttgcatatcttttataagttgaagaaatggcgtttttgccccctgcacccgaaccggcatcgtattaatgaaaagacctaccatatgttcaatgccttcgatttctgcgggtcttcctgaaatgacagaaccgaatacggcgtcatcgttattattatatttttgtagcagaatgccccaaatggtatgaaaaatcgtactgagtgtcacttcttctcttgcagcaagctctgaaagtctgctgctttcttccttagagaatgaaaatgtaacgtgttcctgcctgctttttccctttgtttttttctgcttcgggagcacggtttgctgttcgtggccggaaagataatggtcccaataagaaaccgcctgctctttgtcttgctccatcagccatttgatatactttccgtatggctggaccggctccaatgttataggggatgcatttacataagatgcgtaaatatgcagaaactcctttagcacaatgctgaggcaccaaccgtccatcatgatatgatgaaaggtccaaatgcaagagtactggctctctcctgtttgaataagagcgatgcgcatgagcacatccttttgcaaatgaaacccccggtcccggtccttttctttccattgctcgataaactgtgattgctccgcctcgtttaaatgagtaatgtcttcttccagcacgatgacatttcgttctctcagaacaacctgctggggggaggaaacattttggctgataaaaatcgttctgaaaatatcatgtctttctacaagagcgttgatgctgttttgaaaaaactgcgggttgacttttccttctattgtaaaagaagcttgctcaacatacgcctgtgaatctttttgcaggagggaatggaaaagcatcccttcctgcatgtaagacagcggataaatatcctgaattgaattcgcttttgtcatgttcatgtctccctgtcacgattttctacaattcttccaccaagctggatatgctgtccaagtcctctgccgttaatgattgactgctgaaatcgctcagtgtcttttctgctttctgttgaccggcgcagtgtttcataatgtccagcaaaaagtgttcaatcctgttaataagctgctccattgtgtttctgtgaaagcgggctggcggataactaagattgaaatggagctttttgtctgctgccattgcactcatctcgatgatttgctcacgcttccatgtatgagtgatatcctttccgctaccaaggcttgatgggcggaaggtgtcctgtctttcgatgtcgttgaactggcccaaatagttaaagctgatttcaggtgtttttgaaaacgtaatgcttttattttcagggtgtgtaaggtatttcagcataccgtaacctacccctttgtttggtatccggcccagtgtatctttaacggtttttactgaggttccgagctcatccctatgattttcaaagcttatgagggccgggtacatggatgtaaaccagcctaccgtcctgctgatatctaactctggcagaatgtgttctctcccgtgtccttccatagcgatacggagcttgcttcctcctgtccattcacaaatcgccaaggatgctgcggttaacagaatatcttgtgtatctgtgccataggcgtgattgacgttttgcagcaagacggcggtgtctgcttcagtcagtgaaaagcttaatgagtcccttttgctggtgtccatgttcagatgctgcggtatttcgtatggcagttctgcggcttgctgttcttctatacttcgccaatacgcctcttcgcgaatcagcttactgctttgggcatattcctgtatgcgtcttgcgtattcctggtaggaatccgttttaggcggaagctggatcgtctggcctgcagcagcttgttgatatccggctgacaaatcctcaagcaaaatccgccatgagacaccatcaacgacaaggtgatggatcgcaaggaacaagtaatctccgatcagtgttttaaacaaagcggcgtgcaacaatggtccttcctgcaaattgatgctttgctgaagatctgcaacttcttgtttgatttgcgtctcccagccgctttctgactgtgaaagatcagaggttcttaagctgtatagctgtgactcatgaatgccttggttgatttgaatccatcgcctatcatcgttgcgataaaccatccgaagcgcatcatgatgctccgccagttttttcaaggctggtctaagggcgttttcagacaaacgtccagaatggaatagcatgacagactgattgaaatggtgtctttcttcaatatcttgtgaaaaaaaccattgctgaacaggcgtccaaggaacgtctccctgaatgggtccttgctctatgattctctctgacttacggataaatggtgataagtcctttatctttggatgacggaataaatcacttacctgcaagcttagcccatagcgcccaaggcgtgcagaaacttgaagcgctttgattgaatctccgcccaattcaaaaaacgaatcctctattccgatcctctggatgccgagaacctcctgccagatcaacacaagttggtcttcaaggtcatttcgaggcggagcgtacgtttgtttagatgtgaaatttggttcaggaagtgcttttcggttcaatttgccgtttgatgtgagcggaagagtctccatttcaataatgtacgccgggatcatatagtttggcagcgaacgcgcgagaagtgaacgcacttgttcagcattcgtgcctgcttttacgctgatatagccaaacagctctttgctcccggtctgggctgtacgtgctaacactgcggcttctttgaccccgtctatttgacgaagtgctgattcgatctcacccagctccacacgatagcctctgacttttacttgatcatcaatacggccaacgtactcaattgtgccgtcaggaagccagcgcgccagatcacctgtgcgatacagtcgatcgccaggtgcaaatggatgtgggacaaatttctctttcgttaaatcaggacggcccaaatatcctctggcgacgccatctccgccgacacaaagttcaccgacagctccgaccggctgcagcactccccattgatttaagatataagcggtggaattaccaaccggccgcccgatcggaatggaaagttcatatgttttttgaatgtgaaggcatgtcgaaaaagttgtattttcggtagggccatatccattccatatagatacttcagggcagacatttctgattcgattgacgtggctcggcgacaaagcttctccgccaataatcaaatgtttcagctgtgaaaatgtttgttcattttgttctgtcaaatgattgaatagagaagatgtcagccaaatcgttgtgattccttgatgttctatgtacctcttaagctgatgggaatcgagaaatgtttgttgatcggacagatgcaaagcggcaccatttagcagcggtccgaaaatttcaaatgacccaacgtcgaaacctattgatgatgtcatcagaaggcggtcttcaggtgtaaatgtaatataattgctgtttttaacaagacgaattacacttcgctgctcaatcatgacaccctttggtttaccggttgatccagaggtataaatgatatatgcgagtgaatgtggccctgctgaagaatcaacgttcttcgtttttccttgcttttgaatatcttcgattatgatttgttcacattcaatgtctaatagctgtttttctgttttttcagattgaaggagtaatgccgccccgctgtctgacagcatataagctattcgttcaacaggcagatcagaagcaataggcagataggctcccccggctttcagaatgcctagcattcctgcaatgagttctggtgttctgcctgtcaacaaggctacaacactatcaggccctacgcccttaatctgtagaactgaggcaatttgatttgcccagctgttcaggtcctcgtaagtaaatacttgggtgtcgctgacaattgctacagcattaggcgtttgttcagcctgcatttcaaagagtctgctgatggtttcatttcttggataatctatttttgtgcgattgagctcgtggataaggtaatgggtctcatcctcattcaggatatttattgttccgagagcggctttgttgtctttgaagatggagagtaacatattgatgaagtattgaagccacttttctatcgtttttttcttatataagtcagtactaaactccatttggaacgtcagcaaaccgtggggctgttcctgggcatatagggttaaatcaaatttggacgtttgatgcccattgtttgctgcaggtttgagacaaagttcatccagctccaacgattcctgatccatgttttgaagaacaaacattacgtcaaacagcggatttctgctcatatcccgtgtcaattcaagcttatcaacaagctcttcgaacgggtaatcttggtgctcaaaggcttccaatgctgtctcacgcacttcctgcaaatactgtacgaatggcttcccgccctccgggcgtgtccgaagcgccagcgtgttcacaaacattccgagtatcggctcaagatccttgtgcggccggccggcaattggcgagccgacgatgatatcttcctgtccgcttaagcgtgacaagaacgcggtgtaagccgcaaggagcaccatgtacagtgtgcttccgttttctcgtgccagcttgtgaaggcctgatgcaacctcttgatccagcgtaaatgagaccttgtcacccgcgaagcttcgcaccggcgggcgggcatgatcagccggaagatccagcacaggcagctcgccctcgagctgcttcagccagtacgcctcttgcgttttgtacgcgtctcctgttttgaatccttcttgccatacggcataatctttatattgaatgcgcagtgccggaagattccgattattgtacagctcgccgaattcccgaatcagaatgttgacggaaacaccgtctgaaatgatgtgatgcatatcaaccagcaacaggtgccgctcatctgatatctttacgatttgggcacggaacagcggcgcttggctgagatcaaacggtttgataaatgcggctgcggcctcctgttcggttcgttcgccgagaactgtagtctgtaacgtaaacggcacctcgtcatggatgcgctgcaccggatcgcctcctgcgtcctgttcgaaggaggtacgaagcgactcgtggcgcttgatcagctctttgaaagctctgtccatcctttcaggggtgagcttcccttcgagctctaacacagccggcatattgtagcctgtccctctgtcctccagctgctgaaggacataaatccgcttttgggcagaggaaaccggataggtttcctgtttttcagcgggcttaatcgcttcatatggactgtccgttccttcacggataacggtagccagtccttctactgtcggatgggcaaacacatcttttagcggcacctgtacatcgaattctttggcgatccgtgagacaagcgccgttgcttttaaggaatggcccccgcggtcaaaaaagttgtcgtgaatcccgacagggccatttttcagcacgtcctcccacagctgagaaagcttcatctcagtcacgtttctcggcgctgtgtaggtctccgcatctgccgctccgtcaggagctggcagggcgtttcggtcgagctttccgcttggcgtaacaggccactgttccatttctatcatataggctgggaccatgtagcccggcaacaggctctcaagctgcgctcggacttcgtttctttggagcccttctacataagcgcataattccggctcgccgctgtctgtccgtacggtaacggccgcctcccttacgccttctatgcttcttagtgccgcttcaatctctcccggctcaatccggtagccgcggattttcacctgatcatccgtgcgcccgaggaattcaacattcccgtcagggagccagcgcgccacgtctcctgttttgtacatgcgttcccccgggtaaaacgggtcctcaagaaaacgctcctccgttaatgccggccgattcaaataacctctggcaacacccgctccggcaatgtatagttcgccggcgacaccggaaggctgtacggctaaatgcggatctaaaacatacaaacgcgcaccaggtacgggcttcccaatcggaatccgcaaacggtctctgtcccgttctggatccaatacgtaaaatgccgcgtctaccgttgcttctgtcggcccgtagccatggattaatgatacctgcggcaatacagaagcaaaacgggctgccgtacgcggcgcaagcggttcacctccggcgaatacacgctttaggtttgtcccgtcaccaagcgctaacatttctgcttgatccagaaagctattcagcatagccggaataaaatgagccgttgtcactttttcctgatgaatggcttttacgatcaatgcggagtctttttcccagccgggcggaagcagatacgccgaagcaccggaaagagcccaccaaaacagctgccacacagacgcatcaaaggaaaaagaggttttcaccatgacaatgtcatcttctgaaagcggaaactggtgctgcatgccggtcagaaaggaaacagcctggcggtgctcaacggccactcctttcggctgcccggtagaccccgatgtatagatgacataggcgagagaaccgccgtcagcaggagtaaacagatggttttctgctttttcgctcgcaagagatgtcatatccacttcaagcgtttcgccagaaaagttcggtgcggagcatcccggctgtgtcagcaagagcgatgccccgctgtctttcagcatgtagctcagccgctcctccggatacgcaggatcaagcggcaaatacgccccgccggccttcagtacagcaaggacagcgatcagcatgtcaggtgagcgttcagacaggatcccgacgatactttcgtttgtgacgccgcgtgccgcaaggtgagcagccagccggctggcgtacatatcaagctcagcgtatgtcagcgaaccgcctgaaaagcgaatcgctggccgctccggtgtgactgccgcctgtcgttcaaacagcccatgcaaggttggggcttcaggtgaaacagatactgtcctgttattttgagaaacgattttccgtgttttgtcctcatctagcaatgtcatctttgacacaggaagagatggatcagagatgacgtcagagatcatgtgctgtaaataatcttttatttcggacatcatatttggttgataagtgcctgtatgaaaatgaatccgaacgtacaaagtacgccctgggatcactttgacactgcatctataattagttacctcttccatctcaaaatctttcacggagaaatcaaatgatccagcttgattcagctcttcaatctcttgttgagtaggtgtattttcaaagacgataatatgatcaatcagctcttgtttaagagcgctctgcgcctgaatgtcatataaagggaagtaactatacgcttctgcttcagtcatgtccttttgcattccgctgactaggtcagaaaaagacagaaaatcactttggactcgaataggaatggtattgataaaaagtccgaccatgttttccacatcttttagctcagaaggtctgcctgatataactgatccgaatacagcatcgtcgcgacgattgaacttttggagcatgattccccataaagcttggaaaacagtgttaagtgtcgcaccacatgctgcagcgattttctgtaattcggaggtttctttttcaggaatggtaaacgtgatctgctgtaatgtcccatccgacatttgatctgttcttttaggcagaggtgaagctttttcgaaatgctgaagcctctttttccaatactcagctgcttcttcccggtcttgctgcatcagccatttaatatacgtcccgtacggctgtacgggaggcaaatcaggaaactgcccttttccaagcgcttgataaatatggagaaagtctttaatgacgatgcctaaacaccagccatccattaaaatatgatggtggctccagatacagacataatgatcaggcgcccattttaaaatagatattctcatcagtacatccgtttggagatcaaagccttttgatttatcctgttctttgaatgcctctgtacaatgttctttatctttttcattgagatgagaaatatcttcaacatgaatatggcaatgacgttgcttgagcacgacttgacgaggtttggctacatttttatagatgaatgctgttcgaaagatatcgtacctgtcaaaaacagcatccatacttttctggaaacgctccaagtcgagctgtccattgatcgtaaaagaagcctgttcaaaataagctctcgactgttcatcatacaatgagtgaaaaagcatcccttcctgcataaatgacaaagggtatatatcctgtatttcaggttgctgcggcatcagtgaatctcctctcctatagtttgttgacggctcccatgatctcactcaattcatcaagcgttaagtcttcatcagtgaaatcagatgcgctccactctcggttttctttgccggtacaatgctcaatgatgttttccagagtctgtttaaaatgcctggaaaatgtttggattgttttttcctcaaattgaaccctgttatagatgatgtgcatgttcaggcaccccgaagaaacggcgccgctgatatccagtgcataaggacgctcccagttcgggctgatctcatttcctggcttgatgtcagacacctcaaaggcatttgattgaatatcctgatcaaactggcctaaataattaaagctgatttctgggctgtttttctgagagccccatcttttgctgatatatttcagcacgccgtagcccgcgcctttatgcggtatacggtgcagcatatcttttgtctgtttaataaggtggcccagccgctcttctttgtccttatgatcggaatctctcatatcaagccacacaggataaatggaggtgaaccagccaacagttctgctaatatcgatgtcctcaagatatgattcccttccatggccctccatgctgattttaaattggttatttcccgtccatttctgcaaagcaaaacctaaagctgtcagaaggatatcattcatctccgtgctgtaagctttatgtgcagccgttaatagtaattctgtgtgatggcgagatagctcaaaatcaatcacttctgtatctatgaatgtgttagatgctgcgtcattgtcttttggaataggctggatgtgacggttctcgcactcatcccagtacgctgcttctcgctgcacctggcggcttttagagtagtcagctattctttgtgaatacgttaaatatgaatctgtttttttcggcaatttaatagattctcctgagactgcctgtttgtaagcagctgaaaaatcctcgaacaaaatgcgccaggaaaccgcatcaacaactaagtgatgaatcgtcagaaataaatggtcaccattctcggttctaaacaatccagcatgaagcaaggggccggtttccaaacgaatatgttcttgcatccggctggctgcttcctcaatcgtgtaccgtgcttctgttaggctatcctttacatcaaacagttcaagtgcatatagctcctcatctgaaagatctatccctctgtttatctgcacctgcctgccatcttcatgccggcatacgattctcagtgcatcatgatgagtcacaaggctttttagtacttttctaagcgcagcctcatcaaatcgttcagcccggtagatcataacggactggttaaaatgatggctttccagagattgcgagaaaaaccactgctggataggtgtccaagtaatctcgccttcgaccgggccttggtcaatggcgcgtacgtcttttcgaacccgggcggacagttcaccaagagtctgatgttcaaacatctcacgtactgtcgtttcaaatccgcgctgcttcagtctggcacaaacctgcagcgctttaatagagtctccgccaagctcaaagaaattggcgcttacacccagctcatctacattaagaagctcctcccaaatttcagccatgaccgtttcaatctcatttctaggactgatatcatcagatgtataagcgtgtttttcaggctcaggcagggctttctgatcgagctttccattaacagtcaccgggatgctgtcaatttgtatcatacgggcaggcagcataaagtcaggcaaggcgttttttaggtaagcccggatgtctgatatattcgcagcctgttgatcttttatcaccatgtaagcatatatagctgtttgcccttgctcgtctgctctggtaatgacagccgcctctttaatcattggatactgaagaagtgccgcttggatttcgcctaactcaatacggtgccctctgactttcacctgctcatcaatgcggcctaagtattccagctcgccatttgacaggcgcttagcaagatctcctgttcggtataatctgtctcccggaagataaggattggatacaaaacggtcagcggtcagctcatctctgttgagatatccccgtgccacaccttcgccgcctatatacagctcccctggaactccgatcggctgaagattcatatgagcatccatcacataagcctgcagagttgaaagcggccgtccgatattgcttttattttttacaatgtctgctgcggacaattttttgaatgttacatggaccgttgtttctgtaataccgtacatattaatcaaatcagtatgaggatattttttattccagctttgaagcatgccgggctgtaaggcttcgccgccaaaaatcacgtagcggatgtttaaatgatctgtatgattttgatcttcaagcatcaagctgtaaaaagcagtcggggtctgattgagtacagtgacgcgctctttttttaacaataaacggaatgcatgggggtcacgggctgtttctttagagaccacgactaatgtacctccgttcaataacgcaccgaacatctcccatacagagaaatcaaagcaataagaatgaaataacgtccagatgtcttcatggttaaattcaaaaggcaggttttgatgcttcaagagactgatcacattgcggtgctcgacaatgactccctttggctggccagtcgttccagatgtgtatatcacgtatgcgggctgatctgttactatttcttgaatgtttgcatcagccggaattgagttgttttcacattcatcgatatacaaaatatgcccggtgtagtctgcaggtttgttttgaccgcgctctgtcagcagcagttttgctccgctgtcattaagcataaagctaatacgctccttgggatattcaggatcaatcggcaaataggccccgccagcttttaaaatcgataaaacgccaatgatcatatcaggtgaccgatcgagcatcagaccgacgatatcgccagttcttaccccttgtttgatcagcatagcagctgcccgctcggctttttcattcaggtctcgatacgtaagctgagaatggccgcacaccactgcgatatgctccggatatttagcggcttgcttttcaaataagcttactatgttttcatttctcggataagccgcatactgtcccattttttcaaggagcaacctacgctctgcagcaggaagcaattgcatgtccgaaattctcatctcggtatccgccgttacccctttcaccaattcaataaaataggatgcccactgcgtaatggtttcttcttcaaaaagagcagtgctgtattcaaaacggcagcgtatcccactaggatgctcctcagcgtgtaatgttaaatcgaatttagatatatcatgtttaggagtgacagacgaaatcgacagaccaggcacttcgaaccggaaatcttcactgctttgaagcacaagcatcgcatcgaacagcgggttgcgatttacctctcgatttgtatcgagcttatctgccagctcctcaaaaggataatcctgatgctcgtaagcggtcagagccaggtggcgaatgtcctgcaaataggagctgaacgttttgtggccctcgggcttgctgcgcatcgccaatgtattgacgaacatcccaatgacgcgctccagatcagcgtgcggtcttccggcagcaggcgaaccgacaacaatatcctcttgtccgcttagcttagataacaaaatagaatagacagccagaagaatcatatataatgttgttcccgtttcagccattaaacggtgcagctcatcagccatgtctttatcaatgttgacttcaattgttccaccgctgaaatcagggagacgcggccttgttttatcaagcggtaattctagtgtaggaagactcccgccaagctgaccgagccagtaggcctcctgttttttgtatagctcttttgggtgcttctcttgctgccaaacagcaaaatccttataatgcaggtttaaagctggcaactcttttccgcgatataagtcagtaaattcttggacaagagtgctcatcgagacaccgtcggcaataatatggtgcatatcgagcagcaaaaagccgcggtgattgccgattgtaatgacacatgctctaaaaagcggaccggatgatagatcaaacggtttgataaaggtctcgattgcagactcaagcatttgttctgattccatttcaagctcttttagatcaaaagctatctctggataaatgatctgcacaggctcgtctctgtcaagcacaaaaacagtccgtaatgcttcatgccgattcacaagttctgtgagaacgcttctcaaccgctggcggttcagatttccgcgtaattcaagtacagctggcatgttataacctgtgctggcatctgccagctgatgaagagcatataatcgtttttgcgagaaagacagcggatagacatctctttgatccgcaggttcaatctgtgtaaaagcgtgttcttttaagctcatcaatttgaccgccatgctttcaaccgtcggatatgaaaacacctcactgagcggcagctcgacattaagctttttatgtattcttgataccagtgcggccgcttttaaggactgtccgcctaactgaaagaaatcatcacgaatgccgatgtgctgtttattcagcacatcttcccaaatatgtgcgagatcagcttcgattaaggttcggggcgccatatatgtgacactcgtattgttttctggttcaggaagcgcaaacctgtcaagcttgccgctggatgttaatggcatccggctgatgttgataatacttgctgggatcatataggacggcaatgtcccggcaagatgctgatacaaatctgggaggctgtttcccttttccggaacgatataagcaacgagctccttttcctcagcagaaacatcacgggccagtaccgctgcttcttttacccccggtgcttgtcgaagaactgtttcaatctctctcagttcaatacgataacccctaattttcacttgatcatcaaaacgtccaatatattcaatcgttccatcaggcaaaaagcggcctgcatcacctgttcggtataaacgctccccttcaaggaatggatgatcggagaatgctttctgtgtcagctcttgctgtttgtagtatcctctcgcaagacccgcgccggaaatacacagttcacccgccgcgccgatcggctgcatttgatttccgtgcaaaacaaatacttttgtgtttctgatcgggtgtccgattgtgatcctctctttttcattcagatgccgcaatattgttgttgccacactgttttctgtgggcccgtattcatttgccagttctgcagaaggacaaatcatttgactcaactcaagcagatcaggcgtgaccgcttcacccgcaaatgtcacaatacgaagactttttgcatcgtcagcagtcatcacttccaataacaccctgtacagggaaggaacaatgatcatgtggctgaccttataacgggctatttttcgcttaagggccagcacatccttcgcttcgtcatctgttgtcagcagtacgcacgcaccggataaaagcggggtaaataagctcgttacacagccgtcaaacacgtacgaaaacaaatggagggatatatcctgttcggtcatgtcatactcttcccgtctccattgcaatgtattggcaataccgtgatgatctactaaaacccctttagggcgccccgtcgttcccgacgtatagatcaagtaggctagatcacctggcggcatatttggagcttctgtttggtaactttctgtatgttctatcgttatcgtatttccttcataggacggagggatcaaggaaataaggtcttcttctatcagcaattgagccgcttgactgtccttcagcaggaaagaaagacgttctgctggaaaatgtggatcaagcggcatataagcgccgcctgctttccaaatcccaagcagagctgcaggcatttccattgaccggcccatcatcacagccacgatatctccagatctaacgcctttttctatcagggcgtgcgcaatctgattggctcttatatttaattggcgataggtccagcaatcgtctcccatttttaatgcagccgcttcaggtgttttgcgggcttgttcctcgaacaattggggtatcgttttgttcacataaggacgctcagtttcgttaaacgattggataacctgttgctcctccggcggcacgatattgatgtcactgacggcaacatcgggatttgtcaaaatgcaatccagtgcttgctttagatgcccctgaatcctcagcatctcctcccgctcgtaaacgtctgcgttgtagctgaatttgatataaaatgattctcccggaacgataacgatattaaagtcgtaattggtttgttccgacattgaaatgtcactcagcttcagagcgccttcgtcattttcactctccacgcttaatgcctgatgaagctgtacagggtaattttcaaaaacaaaaatatgatcgatcaacccttgcttcaatggactatggttttgaatttcataaagcggataatacccatgctgttcagatgataaaatatcctcctgcacggctttgaccagcgaagaaaacgttatgccttccgcagatcggattcgcactggaacagtattgataaacaagccgaccattgattcaatcccgtcaatcgctgacgggcgtcccgaaatgacggagccaaaaacggcatcggcatcatctgcagcattatatcgatggagcagcacgccccaaatactcataaacaacgtgtttaatgtcactccccagttttgggcagcctctgtcagtttctcaaccatttcctgcgctaatgaaaagctgacctggtcggctttataattcccgtctgccgtgcggcgctttattcggggaatagaagcagtattgccgtactccttcaaatattcgctccagtaggcagcggtctcttcttgatcttgttctccgagccattcaatataacggctgtacggcaccgtgctgccaagctgtacaggtgagttatttttgagcgaatcatacatgctgaaaaactctttaagaataatgccgagacaccacccatccatgatgatatggtgatgtgtccagacacatgtatattggctgtctcctctatcaaaaagggcaagacgcattaaaggatctttttgcaaatcaaatcctttttcccgatccttagtcataaaagcatcaatcagcgtctgctgttcttgatcagccaggcgagaaatatcttctctatatactgtcaattcccggtttgataagactacctgctgcggacctgtaagatctggtacttctttaatgaaaatcgttctgaaaatatcatatctagaaacaagaaggtttaagctcttttgaaacgagtcgacgcatagattccctgtgatcgtaaacgaggtctgttcgatatatgctttcgagctgaaatccattaatgaatgaaacagcattccttcctgcatgtgcgataacggataaatatcttgaatttgtgccgattgtgccatcaattccacacaccttttcaaaagttaaagatctttcacgagatcttcgatgctagataatgcagacaacgttaattccttattgctgaaatcgctcaatgttttttcgcgtgcttttttctgcgaacaatgctcaatcgtctcgataagatgcctgtgaaaacgatccataaaacactcaattgagtgtttgctgaacacctgggtgtataccgcttttacttgaagccgtccgtccgtaatgagagcgttaatgtccagctcatactctcgttctctctcacccgctatttcgtaacggggctggtaatatgataattgaaacgtatcagcttctttctcttcgctaaattgaccgagataattaaagctgacctcaggctctttatgccgcagttctcctatgtgtgttaacaatccgtatccagttcctttgttcggtactcttctcagcatatcttttgtcatcttaattcggtatgcgagctgatcctcgaaaggctcgggaatacccatgtctagcagaataggataaatggaagtaaaccatccaactgtccttgaaatatcaatgtttggcacatgcccttctctaccgtgtccctcagtgctgatcacgatttggtcatgcccagtccattcagaaagcgccaatcctaaagccgtaagcaaaagttcgttggcatcagtaccataggcttgctgggtttcaaacagcaatttttcagtccagtctccggatagtacaaacgcggctgcgtcgctattcatttggagtctgtccggcacattttctatgtccttaggaagaaaagcagtgtgagcgtctaaaatcgtttgccaatacgttttctctgaaagcaattgtttactttcagctatttgggtaagaccatcggcgtaggataaataagaatccgtttttggcggtaattggatttctttcttttctaaagcctgttgatatgctgcagctaaatcttcaagcagaattctccaagaaacgccatctatcacaagatgatgaagtgcaatcagcaaatgatccccttctgccgttttaaacaaacctgcttgcagcaaaggccctttttctacattcattttgctttgaatgacggtttcctcagcggcaagtttttcatcaagatgagccctttccagcgatgcttttgtccaatctgaaatataaaggccaaacagttcatgatccttgtgattgattccgcgattaaactgaatgacatggccgttttggtcacgttggaaaatcatgcgaatggcatcatgatgctcgattattttacgcagcgctagatgaagcgcgttagcattgaatcctttttcactgaaaagcatgacggactggttgtaatgatagtgaaaagcatgtacctgtccgaaaaatcttcgctgaatcggggtgagttcagcttcaccttccgcaggtccctggtccgcttgagatgccaatggtgtgatatgtccgcatagttcctgaatcgttgaataacggaataagtcgcgtattgtcatgctccagccttcagctgccagacgtgctgccacttgtaatgctttaattgagtctccgccaagctcaaaaaaggaatcgtgaatgccgactcgtgacatgctcagtacatcttcccatatatacgccatcgttttttgtatgtcgttaactggtgcggtatatggacgcgataacacattatttggagccggcaaggcatttctgtccagctttccgtttagggtcagcggcatgttttctaaaggaatcagatgtgcaggaatcatatacgctggcagctcctttgttaaagcagcacggagagcattcgtattgacgtctgaaggcacaatatatgctgccaaaccagcctgtccatttttatcatgctgaacggcaacagcagcttctctgacaagccccgtttgaagcagaacactttcaatttcttctgtttcaattctgtatccatttatctttacttgataatccattcggccaagaagcctgatcgttccgtttggaagccagcatgctcgatcaccggttctgtacagcctttctccagagacaaatggattttctgtaaatttcatttgcgttaagtcaggtttatgatgatagcctttcgcaacacctgccccgccgatgcacagctcgccggcaacaccgatcggctgaatttgatcagtctggctgagtacgtacatgtgtacattcggcagcgggctgccgattggtacgttatctcccgtacactctccacccatactggtttcatagaaactcgaatcaatggttgcctctgtgacaccatagctattaatgatgcgcatgctttggccaaagcgatctgtcaatgttttgaaatcttgagctttcaccatgtcggaaccaaggatcagcatgtctaagtcaggaagcttgaactggttacggtatacatactccatcaccgggataatgagagccggtgtcgactccatcaccgtgattctctgagagttcatgattttatatatttcagcaggttccagccgtgtttcatctgggcaaacgattagagtcccgccgttggtcaatgttctcgccaaatctcctgagaagacatcgaatgaaaagctcgcgatttgaagcagtctgacaggcttccgatccagttcataaatttgacgccaagcaagagcagcatgagtaaagttctgataggtgacaataacacctttaggcgcacccgtcgttcctgacgtataaatgatatataccggctcttcaggagcaggagataagttaaggttgcagttactttcttcataagtgctttcatcgtcaaggcagatatgagacatctcagattcaggcaagtttgaaatcaaatgcttcaattcctgctgtgaaagtagaatatctgccccgctatcacgaagaatatattcaatacgggcttttggataatgtgaatcgattgggatatacactccgccagctttcatcactgccagcactccaacaattgcatcaatggaccgcttggctaaaacagccacagttggcttcggtccttttctgttttgcaatgttcgtgccagacgattggctctttcatttagaagccgatagctaatctctgtttcgttatcaataacagctatatgttctggaatttcttcagctttcgcttcaaatatgcgatgaaaaggaacatctttttgagcaaattcaacctgagttttgttaaattcaaagactattttttgtttttctttatcactaagtatgtttatttgtgcaaggcttgtttcaggggttgaaagtgccgcatgcagaaattggataaaatgatcagcccaccgttcaatcgtagcttttaggaatacttctgtactaaattccatttcgcagcaaatagatccacttacttccgtagctattaatgtgatatcaaataaagaaatgtaatgtgcgaaattggcaggccggacttttatttctctcagatctatgtcctgtttttccacattttgaaggataaacatcgcatcaaacactgggttccggctcatatctcgtgtcaattcaagcttatcaacaagctgttcgaacgggtaatcctgatgctcaaaggcttccaatgctgtctcacgcacttcctgcaaatactgtacgaatggcttcccgccctccgggcgcgtccgaagcgccagcgtgttcacaaacatgccgagtatcgtctcaagatccttgtgcggccggccggcgattggcgagccgacgatgatatcttcctgtccgcttaagcgtgacaagaacgcggtgtaagccgcaaggagcaccatgtacagggtgcttccgttttctcgtgccagcttgtgaaggcctgatgcaacctcttgatccagcgtaaatgagaccttgtcaccagcgaagcttcgcaccggcgggcgggcatgatcagcggggagatccagcacaggcagctcgccctcgagctgcttcagccagtacgcctcttgcgttttgtacgcgtctcctgttttgaatccttcttgccatacggcataatctttatattgaatgcgcagcgccagaagcttccgattattgtacagctcgccgaattcttgaatcagaatgttgacggaaacaccgtctgaaatgatgtgatgcatatcaaccagcaacaggtgccgctcatctgatacctttacgatttgggcacggaacagcggcgcttggctgagatcaaacggtttgataaatgcggctgcggcctcctgttcggttcgttcgccgagaactgtagtctgtaacgtaaacggcacctcgtcatggatgcgctgcaccggatcgcctccttcgtcctgttcgaaggcggttcgaagcgactcgtggcgcttgatcagctcttggaaagctctgtccatcctttcagggttgagcttcccttcgagctctaacacagccggcatattgtagcctgtccctccgtcttccagctgctgaaggacataaatccgcttttgggcagaggaaaccggataggtttcctgtttttcagcgggcttaatcgcttcatatggactgtccgttccttcacggataacggcagccagtccttctactgtcggatgggcaaacacatcttttagcggcacctgtacatcgaattctttggcgatccgtgagacaagcgccgttgcttttaaggaatgtcccccgcggtcaaaaaagttgtcgtgaatcccgacagggccatttttcagcacgtcctcccacagctgagaaagcttcatctcagtcacgtttctcggcgccgtgtaggtctccgcatctgccgctccgccaggagctggcagggcgtttcggtcgagctttccgcttggcgtaaccggccactgttccatctctatcatataggctgggaccatgtagcccggcaacagtctctcaagctgtgcacgcacttcgtttctttggagcccttctacataagcgcataattccggctccccgctgtctgtccgtacggtaacagccgcctctcttacgccttctatgcttcttagtgccgcttcaatttctcccggctcaatccggtagccgcggatttttacctgatcatccgtgcgcccgaggaattcaacattcccgtcagggagccagcgcgccacatccccggttttgtacatgcgttcccccgggtaaaacgggtcttcaagaaaacgctcctccgttaatgccggccgattcaaataacctctggcaacacccgctccggcaatgtacagttcgccggcgacaccggaaggctgtacggctaaatgcggatctaaaacatacaaacgcgcaccgggtacgggcttcccaatcggaatccgcaaacgatccctgtcccgttctggatccaatacgtaaaatgccgcgtctaccgttgcttctgtcggcccgtaaccatggattaatgatacctgcggcaatacagaagcaaaacgggctgccgtacgcggcgcaagcggttcacctccggcgaatacacgcttcaggcttgtgctgtcacgcaacctttcgatttccgcttgatcgagaaagctgttcagcatagccggaataaaatgagccgttgtcacgttttcctgatgaatggcttttacgatcaatgccggatctttctcccagccgggcggaagcagatacgccgaagcaccggaaagcgaccaccaaaacagctgccacacagacgcatcaaaggaaaaagaggttttcaccatgacaatgtcatcttccgaaagcggaaactggtgctgcatgcctgtcagaaaggaaacagcctggcggtgctcaacggccactcctttcggctgcccggtagagcccgatgtatagatgacataggcgagagatccgccgtcagcaggagtaaactcatggttttctgctttttcgctcgcaagagatgtcatgtccacttcaagcgtttcgccagaaaagtttggtgcggagcatcccggctgtgtcagcaagagcgatgccccgctgtctttcagcatgtagctcagccgctcctttggatacgcaggatcaagcggcaaatacgcccctccggccttcaatacagcaaggacagcgatcagcatgtcaggtgaccgttcagacaggacaccgacgatactttcgtttgtgacgccgcgtgccgcaaggtgcgcagccagccggctggcgtacatatcaagctcagcgtatgtcagcgaaccgcctgaaaagcgaatggccagccgctccggtgtgaaagctgcctgtcgctcaaacagcccatgcagggtgaaagctttaggcgaaacagcttccgtcttgttaaactcatacaacaatttttgcttttctcttgtattcgtcatatctaattctcttataaagctgtgcggatgttgaagggcgttttccagtatggtaagcaaatgagattgtattcgtttaatatcctcaagagaaaacaaggtattttgatagtcgaaatttaattgaatggttccattgtctatccgttcttgtatttgaactgaaagctcattcgcggtgtatccgctgaaataaagcgctgtttcatagtcaaaatcatctgcattatgccactgaagtggctgatactgcatagatataccgataaggttgtgtaaatccttctgttcatttcttaattcatttacaagcaaattataaggaaaccgttgatgacgcataacagaaagctgttccctgcctattgtgcgcacaaaggaaagaaaatctgtgtcaggatcaaccgttattctgattggaagggaactaacgaacatgccgagcatttctttttcagcctttgaacctctgttgccatagtaggtgccaatggcaagatcttttttagaagtgattctgctgatgcatatgtaaaatgaagccataaataaggaaatgatattgatcttgtgttcttcgcagaagattcgaatcgtttgctctagatcaggtgaaagaatgatggtgtctctggatgcagatgtgctctgtttttgtaaggacgtctggtcggctaacgagtggtattccaacgggtgctcaaaggtttgtgtccaaaataaacggtcctttgcaaaccgcggagattgtagatattgactctctttttcgatgtagctcaagtaagaaggttccggctgatcaggtaaaggatctttctttttcattttttgataaagatctataatttgatttcccatcacatttaaagagattccatccattatgatatgatggaatttcgcaaatagccaaacttcatgagagtcaattctaaggaggtaaaattgaaaaagaggcgagttgaacagtttaaatggaatgctcgcttgatcctgaatccattgctctatttctatcatttcaacatttgaaaaatcaattattctaagtggataatatttatattcagtaaggtgcaatcgcggctcaagctcttctccttctaacagctgaaatctaatggcgtcgttgcgggagatggaatgattcagtgctccctccagagtatcaagctcaatattgcctttaaatttcacacaggctgtgagattgcaaatactggtatctggctccagcagttcggtaaaccacactctcctttgggcatgggttaaagaataagtatgttcgctcaacggattccctccagttctcataataagaggataagaaaatgtagaaaaaagcagaaaaatgacaataaaagaaattatatgactatataatccatatatgcactatattaacggatattttttaaagtacaataaaaaacattaaatttttataacatttttttgaatatagtattatttctttatttttcgtttctttttttatcaaatttccggatataaagtgataaaagtattgttttacataaggtcttatacactactttttaatcggactaatttgcttttgcccatcattcttctaattgttggaaggttcgacaaagcgttattacagacataaaaaaacctgttttctcttggaaaacaggtctgccgctattattgatttgccaaaatgacagcgatttgatcctcaatatcttttccatcctcttcatcaatcaatccatttagaagaatagagaaaacaagtttttttccgctctttgtttctgcgtaccccgatagagagcttaccgtactgagcgatccggtttttgctcttacttttccttgtgcaggagtgtctttcatgcggtttctcagcgttccgcccaccattctgtcaggattgcccgcaacaggtaaagaatttagataagccgagaaccaactctgatcctgaatgtcatataacagctgtgaaagttgatctgaggatacagcatcaatatgtgagattcctgatccgtctcttaagacgagtgatttagaatcaacaccaaattccggaagcgtactgtttaacacttcgagccccttttcccagctcccttctccttttttcactttccccatctcttttacgagcacttcggcatgtccgttattacttaatttcatgaacggcacaaaaagtttcgataaaggcattgagcgatgagagagcagcacatctgaagaactaggtgcttcacccgtcttgatgtcccctttcacagtaataccttgtttttttagtgactgcttaaataaatctaaggcatatccggcaggctcccagacagaaatccattcctttgtcttgtttgcgtcaaccggtacgctcccttcaattgtaatcgtgtttgttccatgctctctttcgattgtgaggtctttctctgaaccggcagcagtcgtttcagcatcgttctttatcgttatataatcggttttcggagagacagacacggcaggctcttccccttctttttgatttggggtgacctcaacaatcacagtgcctgcatcatagtcttcgtttggagacgctgttagagcggagattggcgcgccataatatgtgtattcatcgctccaaggcatatcaggtgataatcgcatgtcatcatgccacgtatcatcaccgatcagattgcctttaattacttttacgccggaatgtttcaatttctcagccattttgtcaaaatcagatggtaaaagtgtcggatcgcctttccctttcaaataaaggttaccattcagctttttccctttcagtgttccatccgtccggacctcggttgtaaaagaatagttctcgccaaggacagaaagtgccgcggccgctgtcaaaagctttagagaagaggcaggcctcattcgggtgtctcctgaatgttcatatagaacagcacctgtttccgcagagcgaacggtgatgccggccattgcgccttcgagggcaggatgatcagctaaaatcttatcgatctgcccggaaagtgcatcttgtttttcagcggcaagcgcagcctgatgcatataaggcaccgaagcaacgacgaaaagcagtaaaacagcaacataaagctttatgctttttttcattcatttccccgcctctctgcgcttcatcattggctattgatgattcagttcaatggtgatactgcttttagctgtcgtttcttctcccggctccagcacttgtaaaccagtgagtgacgaaggtaaatcaagattcactgcgtttgtcacccatgtgtaaggctcagggcataaatacccttgttttccgtccgcattgtatacaacccaatgtttaaactgttcatctgccttataaataatgctattatgtgcatgctgatgataaatgactgcctggttttctccgcccctcttctgataagaagataaaaagacatcatccagctgcttgtggcgcaaatccattccttcatgcaaagcttctttatacgggacatccatcagtttccctgtcggcagcaggcgttcatccaactcccattgctgatctgctgtcagggaaaataatgagctttctgccggaaatataaatgtagtatgataaccaattccccaaggaaacgcttcctttcctttgttcatgaccgtcgcatgtttaaatagagtattcccctttaccgtgtatgtcatccgaacgacggcatggtgaggaaattgcttatacacatgggggagcccagaaagatcaatttctgtttcaacaatcacttcttcatcagttttcttcgcggtcactacgttccacttttcatggtaaagaaacccatgaagatggttgtgtttatccttctcgttgatatcaaaatgatacgttctgccccggaaactgaatgtaccgtcacttatgcggttaggcgggaacaggattggaatgccatacaatgttggtgtgtcgtgaaaactttctgctgtttccggttcacgcaaaagctggacatttgttgttttgtccacgagagaaatgacgttgctcccccactcagggacaacaatcatttctagatgttcgttgcccgctttgatggccggcgttcccaaatacgtgattttctcaataaagtttgccatgtttactcaacctctccttgattcattgctagtataagaattcaatgtactgtaccatatttcctccattttatattttcccctatcaaataaaaaaacaccgttcaaacttatgaacggtgtgattcggaggctattggatgagacgtgtgatttgtttctttttccagacgaattgataatacccataaatcaacagcaagctgacggcaaacgcagctggataaccaacccagacgccgagtatttcaagctttgtatagtgagaaaggacgaaagcgacaggcacctctactccccagattgcaaaaatactgatgacggtcggccataaaactgttccgcttgcccgcatcgttgcagaaataatttgggcatttccaaacagcaaatagctccacaatgtaatcatcaaaagacggtgcgcaatgtaaagcgtctcttgctcggttaaaaataacgataaaatctgatgtgaaaaaacatagatcagaatgatcagtacgccgccaatgatataattcagccaaatccccacgcgaatgacctgctttaagcggtcaaactcgtttgccccaatcgattgcgcagcgaaaatagaaaccgcaataccaaggctgacggccggcatctgtacatagctggctacctggttgaccactccgtatgcagctgttgcattagagccgtaatgattgacgaatgaaataaccgctatctctgataatgagacaagaatcatattgatgcttgctgggaccccaagacgcagcaggagaaccagcagttccttatccattttcaaataacgacgcactgttttatcaaattgcagcgggtgttttcgctttcgtaaatacaccattaacacgagaaaagtcgcaatcgtggaaatgacagttgcatatgccgagccgtatatgcccagtttcggaaaaccaaacatgccaaggattaaaacaggcaaaagcgcgatgttgatgaccgtgctcacaatcagcgtataaaacggtgtcttagaatcccctgttccgcgcaaaaaggtagtatatgcaaaatataaaaacataaacggcatagcataaaataaaatacgtgcatagttagcgctgacatgaatgacattttcaggcgttcccattaaacgaaggatatccagggtgaaaatactgccgatgacggctaacacaacgcctaataaaaatgtaaacgtgagcgtcgtcccgacaacagcctttagccgttcctcatttttcgctccgtaagcttgtccgatcagaatcgaactacctgaaccgatcccaatcgtaaatgagattaaaagaaaaaataacgggaaaaaggatgatacagctgccactgcatcaacaccgagccatctgcctacagccatcatcccgactagctggccgactgattgcagcacattgctcagcagaagcggcaccaaaaagagtgacatcgaccgccaaactgatggtttgcttttcttttgagttacaagaggttcttgtgatgtttccatattaaaggactcctttatttgaaatcgtttttaaacatgccctcattttttgacaaaaacaggatatgcaacatgttattattcatcactgcacatatgaaacccttcccgattcttctaatttcacacatctttttagcttatgaagaataaactagcaagtaatggcgtattttttgtgagtaaaagaataaaaaaataatttatgcaaaagtattgtaatctatccgtaattattgtaacatttgtaacataagagaaagagattttgaaggagagagcgataatgaaaaaatgtcttctatttctaacaaccattgcacttattctgtcattaagcacaaatgcatttgcgaaaaatacatcaggcaatttatcacaaaaacaagcattacagttggcattatccgctagagaacatttttggaacaccatgagcggccacaatccgaaggtgaaaaaagcagtttgcccatcaggcacattcgagtatcaaaatcttcaatatgtatacatgtgcagtgatctaggcactaaagcaaaagcggtgaattatttaactcctatttttacaaaaacagcaatcgaaaaaggctttaaagattatcatttcactgtttcaaaaggaaaacttgctgttccaatcggtgacggagacaatcttttgaattggaaaaaatcaactgctaaactgatctctaaaaaaggcagcacaatcacatacgaatttaccgtccctacattagacggatccccttctgcaaaacggaaagtgacatttgtgaaagaaaataaaaaatggaaagtcaatcaatttgacgcagttatataagaataacgcccggtataagcgggcgttttttatttggtctgcataaagaaagacaacaggcgaaaagtgcctgttgtctttttgtgaatataacgctctaggagagattcgaactcccgacctgcagtttaggaaactgctgcactatccgctgtgctactagagcttttggtatttatatagtagctctgatgatcaatattttcaagcgatttgtattaaagccctccaaaaaccttatatgcggctcttgtcgtatcttcatcaataccgatataccgcattgtaattgatggtgatgaatgattcagtattctctgcagctcggcgatgtctttcgttcgctgataaaaatgatagccaaacgttttccggagtgtatgcgtccctatctcctcaagtccgcacgccgcagcggcctctcttaaaattctgtaggcctgaatgcgggaaatcggcttcctggtgcgcactgatttaaaaagatattcgttttccttcatgtctttcgtatactcgtatatttcctgtttcagcgattctaaaataagaatctttcttttctttttcgttttgctttcagtcgcccataaatgatctttattttgaacgtccttcacttgcagcggcagaatatcagaaatgcggagcgcgctgttgatgccgaaaataaacagaaaataatcccgcttgtttttgttaagcaaatactgtttgacttcttggattttctctagactgcgaatcggctgtacaatatgcatcaaaaaactccttaaaaacagttatgtaacgttttgaggtctatgttactattatagctgaaaaacgttgaatgtcaaagtgcggcggcgtttatgtaacataatatacatagtgttacataagcttttaaaaaagcttcttcaaaccttcaccctataaaataagctttaaagcctcttataaagcttttaacctcttggatacttatccccctactaatcatcaaaaatcctcttaaaacgcaatctgacgctcccaattttctggagcttccgcaaaaaaacataaaaaaaagacacaacttcaaattgtgtcctaatcctcatcctttacatcaatatcttccgggattggttcatttaatatttcctgcacaagtgctttgtaattctccagctgttcgagatgcgttttgaactgctctttataaatcaaaaattgctctccgtcatgaacggctctgattttcccttcgagcaccaagcttttaatataatcctctgaaagatttgtatattctgctgtttcttcaatcgttaaatacatatagcagtcccttcttaatccgtatgctgattctaatatagcacatggctcatatcaatataatcaattttgcacagaaaaacggcattatgcactatataatataccatttgtcacttgtgaaaacgctgtaatttttttacgctaagattgtaacaatacagcttcatataggagggagaacatgaaaagaacgtggaacgtctgtttaacagctctgcttagtgttctgttagtcgctggaagtgtcccttttcacgcggaagctaaaaaaccgcccaaaagctacgatgagtacaaacaagtagatgttggaaaagacggcatggttgcgaccgcacatcctcttgcttctgaaatcggtgctgatgtgctgaaaaaaggaggaaatgctattgacgcagcggttgccattcaatttgcactcaatgtaacagagccgatgatgtcaggtattggcggcggcggttttatgatggtgtatgacggaaaaacgaaggatacaacgataatcgacagccgtgagcgtgctccagcaggcgcaactcctgatatgtttctggacgaaaacggcaaagcaattcctttctctgaacgtgtaacaaaaggtactgccgttggtgttccaggcactctgaaagggctggaagaagccttggataaatggggaacccgttcgatgaagcaattaattaccccttctattaaactcgctgaaaaaggctttccgattgattcggtgttggcagaggccatttctgattatcaggaaaagctttcacggactgccgcaaaagatgtatttttaccaaatggcgaaccgcttaaagaaggagatacccttattcaaaaggatttggctaaaacatttaagcttattcgctccaaaggcactgacgctttttataaaggaaaattcgccaagacgctttctgacactgtccaggatttcggcggatcaatgacggaaaaagatttagaaaattacgacattacaattgatgaaccgatttggggagattatcaaggctatcaaatcgctactactcctcctccaagctccggcggtattttcttattgcaaatgctaaaaatccttgatcattttaacctttcacaatacgatgtccgctcatgggaaaaatatcagctgcttgctgaaacgatgcatttgtcatatgccgaccgtgcgtcttacgcaggtgatcccgaatttgtaaatgttcctctcaaaggcctgcttcaccccgattatattaaagaacgccagcaattaatcaacctagatcaagtgaataaaaaaccgaaagccggtgacccttggaaataccaagaaggatcagcaaactataaacaagttgaacagccgaaagacaaagtagaaggccaaacaacccactttacagttgctgaccgttggggaaatgttgtttcttatacaacaacaatcgaacagctattcggaacgggtattatggtccctgattacggtgttattttaaacaatgaattaacggattttgatgcgataccaggcggagctaacgaagtacagccaaacaaacggcctttaagcagcatgaccccgacgattttatttaaggatgacaagcctgtcctcacggttggatctcctggcggggccacaattatttcatccgttttgcaaaccattctctaccatatagaatatggtatggaattaaaagcggctgttgaagagccgagaatttatacaaacagcatgagctcttaccgttacgaagacggagttcctaaagatgtcctcagcaagctaaatggcatgggccacaaattcggcacaagtccggtggatatcggaaacgtgcaaagcatatcgatcgaccatgaaaacggcacctttaaaggtgtagctgattcaagcagaaacggcgcggcgatcggcattaatttaaaacgtaaataaattaaaaaactgtactcgcttcaaatgagtacagttttttatacacatctttaaaataaaaactgacaaacgtctttattctgctaatgcacgtctatcttcatcttttcatttcgtttatctcatcaagaaatgtctgaaacgcactcgtaataaaaaagtctttcctgtatataaagacgatctctaagtcttgatatgctggtggcagctgatgaatccatacatttgtacgatgctcggagcagtcaacagcggactttgggagcagcgccgtacccatcccggcggaaacaccttttataatagcctccaatgtgccaaactctatgattttttgattgtgtatgcctgcttcctctagtaatcttttgaccctgtcacgatgagaacagccagccccaaaaaagagcatcggctgctgaagcatgtcttctgccgtcccttctcgtgatgaaatcaaaactaattcatcataggagacatggagttgtctaaccgcagcgtgttcaaccggcccatatacaaaagcgccatcaactttatgatcaagaacctgttgaatcaaatgatgcgtatcagctgtgttcactgataaatccacttcaggaaaacgcctgaggaaggatgctgcatgctcaggcagatgcgttaccgccgtcgtttccagtgatccgatccgcaaaggcccttttggttgcctgctcattcgggtcgatttttcagcttggtctaacagcgataatacttgatctgcatattgtaaaagattttctcctgcagcagtcagcttcattccccgattcgttcgatgaaaaagcctgatattcaaatcttcctcaaggttatgcactctggctgtcacattcgactgaacataattcagcatttgggctgctttcgttatgcttccttcgcgggcaacagcctgaaaaatctttaaatctccgctttccacgcgctctcacctgcttgctatgatgaaaagtgatattggctatcatatttgttcattttactcgaagaaaaccgctatgtaaaatatgtaaagatatgaaaatacaattcaatgaggaggcagacagcatgaaagctataattcacaacggaaaagccggtcttctggggttatcagttcaggacgttccatcaacaaagcctggatacggagaggtaaaggttaaattaaaatctgcaggcctgaatcatcgtgacttgtttcttatgaaaaacaaatctgaacaagatcctcacataatactgggttctgacggcgcgggtatcatcgaagagattggtgaaggcgtgaaaaatgttactgttcagacagaagtagtcattttcccgacattgaactgggatttgacagaaaatgttccacctgtacctgagattctgggaggtccttcggacggaacacttgctgaatatgtgatcattccttcacaaaatgcaatcaaaaaacctgcttatttatcttgggaagaagcgggcgttttacctttatccgctttaactgcatatcgggctctgtttacaaaggggcaattaaaaaaaggcgagcatctattgatacccggcatcggcagcggtgtagcaacctacgctttatttatggctaaggcgattggggcaacagtaagcgtgacctcccgcagtgaggagaaaagaaaaaaggcgctgaaattaggtgctgattacgcatttgacagctacagcaattgggatgagcagttgcagggaaaaaaggcggatgttgttcttgacagcataggacctgccctcttttcggaatacttccgccatgtaaaaccaaatggccgtattgtcagctttggggcaagctcaggggataatctcagttttccggtgcgttctctattctttcctcaggtcaatgttttgggaacctcgatgggaagcggtgaggaatttcaagctatgctcgctttcattgataaacataagctgcggcctgtaattgaccggatatatcctttagaaaaagcatgtgaagcatataaaagaatgcaggaaggcagacagtttggaaacatcgggatcgtaatggaataaaaaaagaaaccggctggcagccagaccggtttctcttatatgataatcccctttatttacggaagaactgaactccccatcaaatatcgatccacttcacgcgccacttctcggccttcattaatcgcccatacgattaagctttgccctcttcttgcatcccctgcggcgaatacaccatcgatatttgtttgataatccccatatgctgcactgattttgttatttacagaatcaacaccgaactgtttcaacagcggctgttctgtgccttcaaagccgatagcgataaagacaagctgagcaggccatactttttccgttccaggcagctcgcggaactcgtatttcccatgctcatttttcactttttccatttggatggtatgaagctctttcagctttccgtttttatccgcaaccatttttgtcgtttgaatggagtattctctcggatctcttccgaattttgcttctgcttcctcgtatgcatattcaagcgtaaagacgtgtggctgttcaggccacatattgtcattcgtgcgggctggcggaagtttcgggtgtttgccgaattggtgcacgcttttggctttttgacgcagagcagtagccacacagtcagctcctgtatctccgcctccgattacgatgacatccttccctttagcatcaatgaattgcttgtctttaaaattagaatctaaatagctttttgttgcaagtgtcaggtagtccattgcgtaatggactccttttgagtcgcgtccttcaattaagaggtcccgctgtttttgagcgcctgtgcataggatcacagcatcaaattgctcctttagctcatcagctgtaatatcaacaccgatttctgtgttcgtgacaaaatcaattccctcttgcgtcagcaatttaattcggcgttctacaatgcccttctcaagcttcatgtttggaatgccgtatgttaaaaggccgcccgctctgtctgagcgctcaaaaacagtgacagaatgccccgcttgattcagctggtcagcactcgccagtccggctgggcccgacccgacgatagcaacttttttgcctgttcgtttttttggaattctaggttgaatccagccgttctcaaatcctttatcgataatggtccgctcgatgtttttaattgatacggccgggtctgaaatcgctaaagtgcatgatccttcacaaggagcgggacatacccgccctgtgaattcaggaaagttgtttgttttcaacagacgttccaatgcttccttccatctgccccggtagacaagatcattccattcaggaattaagttgtaaatcggacagccggatgtaaatccgttaatgtccgcaccgatctggcaaaacggtgtaccgcaatccatacaccgcgccccttgccgtttcgatgcttcttctgaaaaaggagcagaatattctttccaatcctttaagcgagtgagagggtcccgctccgcaggtttttctcgtttgatctccataaatccagttggtttccccatgttcctctccccttccttactgtactaccgcttgtttttgtcccgatgctgctgtattctgctttggcttcgtgttggcctcaaaagcgaacatgatggcttcttcatctgataaacctgcagctttttgctcttcgatgcttgcgagcatttgtttatagtttttcggaatgactttgacgaattttttcacactgtcttcccattgatctagcagatcttctgctttttggctgtttgtatacgcagtatgtctttcaagcattgctttgatttgctggatttctttctcatcctctaatgattcaaataaaatcatctcaaggttgcatttgcgtttaaacgctttgacatcttcggtcagtacataagcgattccgccggacatacctgccgcaaagtttttgcctacatcaccgagaacgacaacgctgccgccagtcatgtattcacagccgtggtcgccgatgccttctacaactacgttcacaccgctgtttcgaacggcaaagcgttcaccagcacgtccgttaatatatgcttctccgcttgtcgcaccgtaaaaagccacgttgccgataatgacattgtcatccgaagcagagttgaatccttctggtgacttgacgatgatttttccgccagaaagcccttttccgacgtaatcatttgagtctccgtctaaataaagcgtcatccctttaggaacgaaagctccaaagctttggccggctgatccggtaaagtgcaacttgattgtatcttcaggaagaccttcttctccgtaacgctttgagatttcactgccggttatcgttccggctacacggtttgtattgttgatttcgatagaaacttccgcttcttttccagattcgatggcttcttgtacggccgggagaatcgctgtaatatcaagtgattgatcaattttatgattttgcggcgattggaacgtccgcaccccatcaggctgataaagaagggtagacaaatcaagctggcttgctttccagtgctcctttgcccgttcacttacatgaagtacatcagtgcggccgatcatttcatcaaatgtcttgaagcctaacgcagccatatactcacgaacttcttcggcaatgaacagcatatagttcacaatatggtcaggatctcccatgaactttttgcgaagctctggattttgtgtcgctacaccgacagggcatgtatccaaatggcaggcacgcatcatgacacagccgagtacaactaacggagccgttgcgaaaccaaattcttcggcgccgagcaaggcagccatcacaacgtcgcggcccgtcatgagctttccgtctgtttctaatacaacacggtcacgaagtccgttcagcattagtgtttgatgtgcttctgcaaggccaagctcccacggaagccctgtatgtttaatactggttttcggagaagcgcctgtacctccgtcatagccgctgatcacaatgacatctgcagtcgctttggcaacacctgcagcgattgttcctacacctgcttttgacaccagctttacgctgattcttgcgtcacggttggcatttttcaaatcgtggatcagctgggctaaatcctcaatcgaataaatgtcatggtgtggcggaggtgagattaatccgacacctggcgttgacccgcggacatcggcaacccatggatataccttgttgccaggaagctgcccgccttcacccggcttagcaccttgagccattttaatctgcagctcatcagcattgacgaggtaatggcttttgacaccaaaccgtccggatgcaatttgtttgatcgcacttcttctatcatcgccgttctcatctggaacaaagcgtttgggatcttctccgccttcaccgctgttgctttttcctccaagacggttcattgcgattgctaaagcttcgtgcgcttccttactcaaggacccgaatgacatcgcacccgttttaaaacgtttgacaatcgattcagcggattcaacctcctccaacttcaaaggcttgcggtttccgtcaaatgcgaacaagttccgcaaaaatccgatgcgttcttcatcagccgcttttgtatactgtttaaacagattgtaatcatttctgcggcacgcccattgcaaagtatgaatcgttttcggattaaacgcatgatgctctccgccatttctccattgaaagtcacttcccggttcaagcgttttgctgtaatcatcctgatacgcttcccggtggcggcgctgtgcctcttctgcaattgtttgtaaatcgatgccgcctagctgtgatgcagtacctgtgaaatagcggtcgatcacatcgcggctgattcctaccgcttcaaagatttgggcgcctctgtagctttgcacagttgaaattcccatcttggacatcacttttacgacgccctcagtaatgctttttccatatttgctgaccgcttcttcatagctgatatccaaacggccttcatcaatttcctgcttgtaggtcgcataagcgagataagggttaatcgcatctgcgccataaccgattaacgctgcaaagtgatgcacttcacgtgcttctcccgattccacaataatgctgaccttcgtacgcagccctttgcggattaagtgctggtgcagcgcgcttactgccagaagcggcggaattggtgtcagtcgttcgttcatctttttgtctgataaaattaacaaacttacgccttggctgatggctttctctgcttgtgtgaacatgtcctttaatccgcgttcaagatcctctgaaaacagcacatcaattttttggctttttaaatctggatgaacaatcgttttcaatgcgtaaaactgttcattggataaaacaggtgtatacagtttaatccggcgaacatttcgttcacttggatgaagaagatcgccttccgcaccgagccaagtcatcgttgaagtgacaagctgctcacgaatcgcgtcgattggcgggttcgttacttgtgcaaacagctgtttaaagtagttaaacagtgattgcgctcggtcagatagtacagcaagcggagcgtcattccccattgaaccaaggggatctttgccttctttaataacaggaattagatacttttggatatcctcatatgtgtatccgaatgccttctggcgagtaagaagatcactaaattgttcttcttctcttgactccggatcaggatttacttgtacaagctcttcttcaagccatttttggtacggatactcagttgcaatttgtgttttgacttcctcatcggagataatacggccttcttccaggtcgattaaaagcattttcccaggctcaaggcggtttttatataaaacgttctcctgttcaacttcaataacgcctacttcagatgagaaaataatataatcatcttttgtgacataataacgggccggacggagaccattccggtcaaggattgccccgatttgtttaccgtcagtaaatgaaatggctgtcggtccgtcccaaggctccatcagggagctatggtactcgtagaacgcccttttttccttggacatatgcgtattttccgtccaaggctctggaatgagcatcattgccgtatgtgccggtttgcgtccagccatcacaaaaaactcaaatgcgttatccaaaatggaagagtcactgccatcagcattgagaatcggcaaaatcttgtttaagtcctcaccgaagctttcagaaacaaattgctgctcacgtgctctcatccagttgatatttccgcgaagggtgttaatttcaccgttgtgaaccaaataacggttaggatgcgctctttcccatgtagggaatgtattggtactgaagcgtgaatgaacgagcgcaaaagcagaaacgaatgcttcgtcttgcagatcagaataaaatgcatcaacctgttcaggtgttaaaaggcctttgtaaacaatggtctggcttgaaagactggcaaaataaaaatcaagatcttccgttactccccaattttcagcctgtttacgaatgacatacaattttcgttcaaaagataaattgtcctttagatcagaacttgcgccgataaatacctgacggacaaacggacagcttttttgcgctactgttccgatttttccgacatttacaggtgcagttctccatccaagaacgacttggccttcttgttcaatcagtgcattgatttgcttttcaattttttttctttcatcttctttctgtgagaaaaagaccattcctaccccgtaacgttctttttctggcagattgatgtctttgcactcttttctaaagaaagcatcagggatttgaaccagtaagccggctccgtctcctgtatccggatcactgccttgccctcctctatggtctagctggcaaagcatcttaagtccttgtttgacaatgtcgtgagtctgcttgccctttaagtgtgcatataggccgattccgcatgcatcatgttcaaattcaggacggtagagaccttgagcttttggcatttgattgtacgtcataattcctctcccccgatcaatttccgataataccggtcataaaatctaacaactctataatcattgtaggttttcaaaacgatataaacaatatataatttagatcaaaagaatctcaaaatgagatagatggatgtgagacaaacatggagctgcgccaactgcgttatttcatggaggtggctgaaagagaacacgtttcagaagccgctgatcatttgcatgtggcccaatcagcaatcagcagacaaattgccaatcttgaagaagaattaaatgtgaccttatttgagcgtgaagggagaaatatcaaactcacgccaatcggaaaagaatttttgattcatgtgaaaacggcgatgaaagccattgattatgcgaaagagcaaattgatgagtatcttgacccgcatcgcggaacggtaaagatcggctttcctacaagcctcgccagccagcttttgccgactgtcatttcagcgtttaaagaagaatatccgcacgtcgaatttttgctgcgccaaggctcctataagtttctgattgaagctgtcagaaaccgcgatattgatctggccttattaggaccggtgccgacgaatttctctgacataacgggaaaaatattatttactgaaaaaatttacgcgcttgttccattaaatcatccgcttgctaaacaaaaaacggttcatttaatcgatttgcgcaacgaccaatttgtattgttcccggaaggatttgtacttagagagatggcaattgatacttgcaaacaagcaggctttgctcctctcgtttccacggagggtgaggatttggatgctatcaaagggttagtgtccgcaggaatgggcgttacccttctgcctgaaagtacttttgctgaaacaacacctcgttttactgtgaaaattccaattgagttccctcaagtaaaacggactgttggaatcattaaaccgaaaaatagagagcttgcgccttctgcgaatgatttttatgagtttgtcattcaatttttctctaagctggagcagtatcaataaaaaaatgaacccgagcttctatatagaagcttcgggtttttttctgcaaattaatttacaggtaaagaaaaatccacatggcaaacaaaggcttcttgatcaattagagctctgtttgtcagttccttgttcttttccggttcttgaagctgtacagaagagtaattgacgattccaaggccgatttccgtcccttttgaatccattagccgaacaactgaaccgcttttaaatttccctttaatcttctgtacaccgtctaggtataaactcgattggccgtttgttatttttcgtgaacaatcatctgataaaatcatttcaccttccggaccggaattaaaagcgatccattgctccttttgattcaacggaagcgttccttctgcttcaaaataggtgccttccgcctgttcatgaacggcgtgatataaaatatcgccggcatctgcctgaccaaggaaacctttaatgccagacgccattacgattttaaacgcatcaagcttagagcgcatgccgccggtgccaacgatgcttccagtgtcacctgcgcatgcttcgatgtcaggtgttatttcactcacccgctgtatccttttcgcttctggatttgtgcgcggattgccgtcatataatccgtctatatctgataaaatcacaagcatatctgcatcaatcaatcctgcgacttttgccgcgagtgtatcattgtcgccaaacttgagccgattgacggtaactgtatcattttcgtttatgatcgggatgatgccgcgctcgagcagtacattcattgtattcctgacattgttgtatcgatattcatctgaaaaatcgcttcttgtaattaaaatttgggatgcgacatagccgtgtgccaaaaacagctttgaataagcctccatcagcaatccctggccgattgaagctgatgcttgtttttctggaagcttctcgggcctttggataaatccgagtttccgatatcccgccgccactgcgcctgaggaaaccaaaattacttcataaccggcgtctttgagtttgacgacctggtcgaccaacgcttctaattttcgaatgctgatttctccatgaaggcttgttaatgaactgcttccaatcttcacaacgactcttttcatgcttgtatcaggcgtcactttatcactcctgatagcggcgctgcagttttttcgatatcttcgctgatttcctttgaacgcttagccgcatgctttatcgcttgagaaatcgcttctccgccgccgctctttttcaaggcttgcagccccgctgctgtcgttccgttcggtgacgtgatattatctcttaagatctcaggatgttctcctgtttccatgagcatttttgcggcacctaaaagtgtctgtgcgccgatgcttcgagataactgtttatcgaggccagcttcctcgcctgtcttttcaatgaattccattaaataataaaaatacgcggggccgctgcctgcaattccggtgaatatatccatttgattttcttggattgtatagacttcgcccatgcatccgagcaatgcttcggccagcttcttcaggtcttccgacacatattttccaagggcaatagctgttgcagaagcgccaatcatactggaagtgttgggcatcactctgacaaccggctgttcattaagcaatgattgttcaataaaagaggtagttatgccggcaaggaccgacaatattaattgatggggttgaatacgtgattttagtgatgacagagcgttttcggcgtcttttggcttcattgccaaaatgagcacatccatgtcttcaatacatagttggttcggcaaggcgcctttaatgccatattgaagttcaagttcagttaatcgctctgtattgctgcggtttgtaacgcagatgttttgtttcgggattttgttggcacgaacgatacctgatatcattccttccgccatagatcctgctcctataaaggctactttcttttgatcaaagatcggtaacatctcctttgttcgcttttttgttcgcattttcacacgtttaaaatgttaccacgtgaggaaatgatgtcaagtttgaaggtcatcattgatttgtattgtttcttttcgacaaatatgtataatgaaaagcagaaaacacccggttcacactgctgcgccgggtgtttgtttctattaaaaattatctgagagagctttttcaatcagttttttacagcgatccagctctaccttcagctgttttttatatagcttggcggcttcgtaatctttaaattgatagaggacgacttcctggagcttagccccttctttttttactttaatttgttttagtatcccgtcatcaagaagctcatgcaaagaccggtatacttctgtatgatttggtttaaaaccaatctctttaaattcagaccgaagtacttcaagcagctttaacccatagagtctctcttgctctgtcatcgttatcatataaagcttcaaaaatgcgcgctgtttcactaaaaagcctgttgaactccttttttcttctttcatcatatgcactccttcttctgtcactgacaacactatgtactaaatattcaattttcttttattgttttccttctttatattaaagactgatagtccagtcatttcatatttactgattataggtgtagcggaaaaaataaatttcgactgaacatttggtacatagttttcttagttctattatagcctgcattcactgccagcttcaatttaaaacgattgtcagatttgcatatgccggtatgaatttcattcaaataaaaaaacctgtcgaaagacaggttttcatttttaaggatttgttgaccataatcccgctgttttgatgaaaatgcgtggatctaatttcaattgtgccaccatgtactcagcaagatcctcaggctgcatcactttttcagggttaccgtctgttaagttcaattcgatagacatatcactagcgacagtgctcggcgttaacgcgctgactctgatattatgttttctcacttcttgcataagagactctgttaaccctagaacggcaaatttagaagcgctataagcacttgttacagcagctcctctttggcccgctgtagacgaaatattaatgatatctccggctttgcgttcgatcatttccggaagcaccgcgcgagtcacatgatacacacccattaggttgacttgtataatattttcccattcatcggctgacagatctaagaaaccgccaaatttgctgattcccgcgttattaatgagaatatcgatatcaccaagctgttctttcacttgagcgacggcttggttaacctgctcggcatcttttacatctgcagcagcaaatgcagcttttacaccaagcgctttgacttcttctgccactttttcaacattagcggcagtccggccgattaacccaatatttacgccttctttcgcaagagcaagagctgtagcacggccgatccctctgcctccgcctgtgattagtgcagttttatgttgtaaactttgcaattgaagcaccctttctttgtttacatatgtacgatatcacattataagtacaatacatccaatacgcaaatcaaacgaactgtgtaaatatcatttcttctgattaaaaaagcggatacagggtaatgacataagaaaaggagtgaacatatgattatagtttatatcagtcttgtagtattagcagtttctattatcttcttaggagttaccgtgattcaaaacaagaaaaaaatggaccctgcactaaaggagctttcctctgttacgcaggctatgcaaaaacaaatcgaaggattaaaaacagaaacagagctgctgacgcaaaaacaaaagaagattcagcaggatgtccaaataaaaaaatacacgtttcagcagaccgcagctgaagtgaaagaagttccccaagcagtcaaagaggtgtggcaggcaggacattttaatagcagataaggatgaatgagatcccgttgttacgatcagaatggacaaatgggatctcatttttcgaggaggcttacacatgattataaaccgcagctgcttaaaagagttcgcagaaaaagtacattttcttccctcttcacttacaaagtccgatttacttactgatccatttcgtctccatcaagaaaacgaacttggcatctactattcacctcataatgaatttatcaatcgggatgcctcgcttgtgattgccgggatcacgcctggtttttcccagatgaagacagcgtacgaaacagccgccgaaagcctgcggcaaggcgggactcttgagcaaatggcagtagacacaaaaatagcagcgggtttctccggatcgatgagacataaccttattaccatgctggatttatgcgggctgccgcaagcttttggcattcaaagcgccgcaaagctttttggagaattacggcatatgctccatacaacttccgttattaaatatcctgtctttatccagcaaaaaaactataccggatacaaaccggctatcactcattctcctatcctaagcacttatgcttttgggcacttccctgcagagcttaaccatgtgacgggaccagctcttctcattccgttaggaaaagcggccgaaacagtgtgtgaaacattgatcagacagcacagcctccagaatttgatttgccttaacggctttccccatccatcaggcgcgaacggccatcgtttgaaacaattcagcaaaaacaaagagcaactagaaagacaaattcgttcctttgctgcattggttgatttcgctatagaaaagaggaaataaaagggatatgataaacaaaaacacaaacgtggggagtggttgaatgtttcctatattagaaacggatcggcttatacttaggcaaatcacagatcaggatgcggaagccatttttgcttgtttctcaaacgatgaggtgacacgctattatgggcttgaaaacatggaatctatagaacaggccatttcaatgattcaaacgtttgctgccctctatcaagaaaaacgcggtatacggtggggaattgaaagacgggacactaaagaactgatcggaacaattggctttcacgctctggcccaaaagcataggcgcgcggaaatcggttatgaaatcatcccggagcattggcgaaacggatttgcatcagaagtcatttcaaaggtcgtatcttacggattttctgcccttggactgacgcgtattggcgcagttgtatttaccgctaatgaagcatcaaatcggctgcttctaaaaatgggttttcaaaaagaaggcgttttaagacagtacatgtatcaaaatggaattccaaacgatacaaatgtatattctattttaaaatcaagcaaatgaacggacgacattctctcaatctgtatgcacactcccttcctcttcttggtgactgcccaaaatagaaggggcagccagcctctgcaccgactccagtatgggacagtaaatgctaaatagcctgatagaacacatcacaaaatatagtgaagaggcttattctttttcttgccccgcatgaatgatctgtgatgtaccaatggtttggccagaagaattcaatgctttcacctgaaaatatggcccaatcgaatgaacaagaatatctgtttcaaatccggttcggggagcatccgttcccacctcagacaatttgttaggtgctgtaccagctaacactttccaggctacagtttcagttgaaccgttccatgatgcataaacaatggctgcatcttcacataatggatttacagcaatactgggtggataaaacggcaagcctacccatttatccttaaacgccctataagaaagattttgaccaggaaactgcatatcatataacaaattcaacgaaggatcttttttattattaccagcactcctatattcagaaagatacggttcctgtccccatccaacgaattgatttccatttgatagtttctgaacatttccttgacttggaacatacagcgctggatcatgataataagttcgatctgcttttgcagtcatgttatggaaatcaagttgaaggattaaaccacgagcctctccctcaggcggagagcttgaagaagcac
